(19) United States
(12) Patent Application Publication
(10) Pub. No.: US 2012/0207777 A1
(43) Pub. Date: Aug. 16, 2012

(54) DETOXIFIED ESCHERICHIA COLI IMMUNOGENS

(75) Inventors: Laura Serino, Siena (IT); Danilo Gomes Moriel, Montariggioni (IT); Maria Rita Fontana, Siena (IT)

(73) Assignee: NOVARTIS AG, Basel (CH)

(21) Appl. No.: 13/384,224

(22) PCT Filed: Jul. 16, 2010
(86) PCT No.: PCT/IB10/02043

§ 371 Date: May 7, 2012

Related U.S. Application Data
(60) Provisional application No. 61/290,654, filed on Dec. 29, 2009.
(60) Provisional application No. 61/226,219, filed on Jul. 16, 2009.

(51) Int. Cl. A61K 39/108; C12N 15/31; A61P 31/04; A61P 37/04; C12N 1/21; C07K 14/245

(52) U.S. Cl. 424/190.1; 435/252.33; 530/350; 536/23.7

(57) ABSTRACT

Detoxified variants of the pathogenic E. coli ‘AcfD precursor’ (orf3526) have been identified that raise a substantially similar immune response in a subject as the native AcfD (or B526) protein. The detoxified variants may be further modified to have increased solubility as compared to the native AcfD (orf3526) protein

[0001] This application claims the benefit of U.S. provisional applications 61/226,219, filed 16 Jul. 2009, and 61/290,654, filed 29 Dec. 2009, the complete contents of both of which are incorporated herein by reference.

### TECHNICAL FIELD

[0002] This invention relates to immunisation against pathogenic Escherichia coli strains.

### BACKGROUND

[0003] E. coli strains have traditionally been classified as either commensal or pathogenic, and pathogenic strains are then sub-classified as intestinal or extraintestinal strains. Pathogenic E. coli are discussed in more detail in reference 1, and fall into a number of different pathotypes i.e. a group of E. coli strains that cause a common disease using a common set of virulence factors. Pathotyping of strains is a routine technique that can be performed genotypically or phenotypically. One recent genotype-based pathotyping method [2] uses a DNA microarray.

[0004] Among intestinal strains at least six well-described pathotypes are known: enteropathogenic (EPEC), enterohaemorrhagic (EHEC), enteroaggregative (EAEC), enteroinvasive (EIEC), enterotoxigenic (ETEC) and diffusely adherent (DAEC).

[0005] The extraintestinal pathogenic strains (or ‘ExPEC’ strains [3,4]) of E. coli include uropathogenic (UPEC) strains, neonatal meningitis (NMEC) strains, and septicemia-associated strains (SEPEC). ExPEC is the most common cause of urinary tract infections and one of the leading causes of neonatal meningitis and neonatal sepsis in humans, which can lead to serious complications and death. Other types of extraintestinal infections include osteomyelitis, pulmonary, intra-abdominal, soft tissue, and intravascular device-associated infections. Another ExPEC pathotype outside humans is avian pathogenic (APEC), causing extraintestinal infections in poultry.

[0006] Most previous ExPEC vaccines have been based on cell lysates or on cellular structures. SOLCOUROVAC™ includes ten different heat-killed bacteria including six ExPEC strains. URO-VAXOM™ is an oral tablet vaccine containing lyophilised bacterial lysates of 18 selected E. coli strains. Baxter Vaccines developed a UTI vaccine based on pili from 6 to 10 different strains. MedImmune developed a product called MEDI 516 based on the FimH adhesin complex. In contrast, references 5 and 6 disclose specific immunogens from ExPEC strains that can be used as the basis of defined vaccines against both NMEC and UPEC strains.

[0007] It is an object of the invention to provide further and better antigens for use in immunisation against pathogenic E. coli strains, and more particularly against intestinal pathotypes (e.g. EAEC, EIEC, EPEC and ETEC strains) as well as ExPEC pathotypes and in particular antigen that have been detoxified so as to enable their use as components for immunisation or that have been shortened without reducing the immune response raised to as to improve the expression and purification.

### DISCLOSURE OF THE INVENTION

[0008] One of the many antigens disclosed in reference 5 is annotated as the accessory colonization factor D (“AcfD”) precursor (orf3526) (SEQ ID NOs: 7051 & 7052 therein; SEQ ID NO: 1 herein). Reference 5 discloses the sequence from NMEC strain IHE3034, and the present invention is based on variants of the ExPEC ‘AcfD precursor’ (orf3526) that have been identified in further pathotypes, including APEC, UPEC, EAEC, EIEC, EPEC and ETEC strains. Unlike the disclosure of reference 5, these variants can be particularly useful for treating intestinal pathotypes. Thus the invention provides such variants, together with their use in immunising patients against E. coli infections. In addition, this disclosure includes fragments and mutants of the AcfD (orf3526) protein of all E. coli pathotypes where the fragment has increased solubility as compared to the full length while raising a substantially similar immune response in a subject as that raised by the full length protein. Further, this disclosure includes fragments and mutants of the AcfD (orf3526) protein of all E. coli pathotypes where the fragment has decreased toxicity as compared to the full length protein while raising a substantially similar immune response in a subject as that raised by the full length protein. In addition, this disclosure includes fragments and mutants of the Acfn (orf3526) protein of all E. coli pathotypes where the fragment raises a substantially similar immune response in a subject as that raised by the full length protein while having improved characteristics with regard to purification when expressed in E. coli.

Polypeptides Used with the Invention

[0009] The invention provides an immunogenic polypeptide comprising an E. coli AcfD (orf3526) polypeptide comprising a mutation relative to the E. coli AcfD (orf3526) protein which decreases the toxicity of the immunogenic polypeptide as compared to the E. coli AcfD (orf3526) protein and wherein the immunogenic polypeptide raises a substantially similar immune response in a subject as the E. coli AcfD (orf3526) protein.

[0010] The E. coli AcfD (orf3526) protein may have an amino acid sequence selected from the group consisting of SEQ ID NOs:1-19.

[0011] Exemplary mutations that decrease the toxicity include a deletion of all or a portion of the zincin metalloprotease domain and a point mutation in zincin metalloprotease domain which reduces the protease activity. In certain cases, the point mutation is a mutation of a zinc binding residue or a mutation of a catalytic residue. A preferred point mutation is substitution of amino acid number 1305 based upon alignment with SEQ ID NO: 1.

[0012] Exemplary deletions include removal of at least the last 100 C-terminal amino acids of the E. coli AcfD (orf3526) protein, at least the last 200 C-terminal amino acids of the E. coli AcfD (orf3526) protein, at least the last 300 C-terminal amino acids of the E. coli AcfD (orf3526) protein, at least the last 400 C-terminal amino acids of the E. coli AcfD (orf3526) protein, at least the last 500 C-terminal amino acids of the E. coli AcfD (orf3526) protein, at least the last 600 C-terminal amino acids of the E. coli AcfD (orf3526) protein, at least the last 700 C-terminal amino acids of the E. coli AcfD (orf3526) protein, at least the last 750 C-terminal amino acids of the E. coli AcfD (orf3526) protein, or at least the last 758 C-terminal amino acids of the E. coli AcfD (orf3526) protein or does not comprise at least the first 100 N-terminal amino acids of the E. coli AcfD (orf3526) protein, at least the first 200 N-terminal amino acids of the E. coli AcfD (orf3526) protein, at least the first 300 N-terminal amino acids of the E. coli AcfD (orf3526) protein, at least the first 400 N-terminal amino acids of the E. coli AcfD (orf3526) protein, at least the first 500 N-terminal amino acids of the E. coli AcfD (orf3526) protein, at least the first 600 N-terminal amino acids of the E. coli AcfD (orf3526) protein, at least the first 700 N-terminal amino acids of the E. coli AcfD (orf3526) protein, at least the first 750 N-terminal amino acids of the E. coli AcfD (orf3526) protein, or at least the first 760 N-terminal amino acids of the E. coli AcfD (orf3526) protein.

[0013] The invention provides an immunogenic polypeptide comprising an E. coli AcfD (orf3526) polypeptide wherein the immunogenic polypeptide comprises an amino acid sequence that comprises:
[0014] (a) the amino acid sequence selected from the group consisting of SEQ ID NOs 20 to 76;
[0015] (b) at least α% sequence identity to any one of SEQ ID NOs: 20 to 76; or
[0016] (c) has 1, 2, 3, 4, 5, 6, 7, 8, 9 or 10 (or more) single amino acid alterations (deletions, insertions, substitutions), which may be at separate locations or may be contiguous, as compared to the sequences of (a) or (b); and/or;
[0017] (d) when aligned with any of SEQ ID NOs: 20 to 76 using a pairwise alignment algorithm, each moving window of x amino acids from N-terminus to C-terminus (such that for an alignment that extends to p amino acids, where p>x, there are p−x+1 such windows) has at least x·y identical aligned amino acids, where: x is selected from 20, 25, 30, 35, 40, 45, 50, 60, 70, 80, 90, 100, 150, 200; y is selected from 0.50, 0.60, 0.70, 0.75, 0.80, 0.85, 0.90, 0.91, 0.92, 0.93, 0.94, 0.95, 0.96, 0.97, 0.98, 0.99; and if x·y is not an integer then it is rounded up to the nearest integer,
[0018] wherein the immunogenic polypeptide comprises a mutation relative to the E. coli ACID (orf3526) protein which decreases the toxicity of the immunogenic polypeptide as compared to the E. coli AcfD (orf3526) protein and wherein the immunogenic polypeptide raises a substantially similar immune response in a subject as the E. coli AcfD (orf3526) protein.

[0019] The preferred pairwise alignment algorithm is the Needleman-Wunsch global alignment algorithm [7], using default parameters (e.g. with Gap opening penalty=10.0, and with Gap extension penalty=0.5, using the EBLOSUM62 scoring matrix). This algorithm is conveniently implemented in the needle tool in the EMBOSS package [8].

[0020] These polypeptides include other detoxified variants of SEQ ID NOs 20 to 76, including allelic variants, polymorphic forms, homologs, orthologs, paralogs, mutants, etc.

[0021] The value of α may be selected from 50%, 60%, 65%, 70%, 75%, 80%, 85%, 87.5%, 90%, 91%, 92%, 93%, 94%, 95%, 96%, 97%, 98%, 99%, 99.5% or more.

[0022] The foregoing immunogenic polypeptides may further contain a deletion relative to the E. coli AcfD (orf3526) protein which increases solubility of the immunogenic polypeptide as compared to the E. coli AcfD (orf3526) protein while the immunogenic polypeptide still raises a substantially similar immune response in a subject as the E. coli AcfD (orf3526) protein.

[0023] Exemplary deletions that increase the solubility include removal of substantially all of the N-terminal amino acids up to the gly-ser region, removal of all or a part of the N-terminal proline-rich repeat, or both. The immunogenic polypeptide of claim 8, wherein the deletion is removal of at least the first 20 N-terminal amino acids as compared to the E. coli AcfD (orf3526) protein, at least the first 20 N-terminal amino acids as compared to the E. coli AcfD (orf3526) protein, at least the first 30 N-terminal amino acids as compared to the E. coli AcfD (orf3526) protein, at least the first 38 N-terminal amino acids as compared to the E. coli AcfD (orf3526) protein, at least the first 40 N-terminal amino acids as compared to the E. coli AcfD (orf3526) protein, at least the first 50 N-terminal amino acids as compared to the E. coli AcfD (orf3526) protein, at least the first 60 N-terminal amino acids as compared to the E. coli AcfD (orf3526) protein, at least the first 70 N-terminal amino acids as compared to the E. coli AcfD (orf3526) protein, at least the first 80 N-terminal amino acids as compared to the E. coli AcfD (orf3526) protein, at least the first 90 N-terminal amino acids as compared to the E. coli AcfD (orf3526) protein, or at least the first 94 N-terminal amino acids as compared to the E. coli AcfD (orf3526) protein.

[0024] The invention also provides an immunogenic polypeptide fragment of an E. coli AcfD (orf3526) polypeptide wherein the immunogenic polypeptide fragment comprises an amino acid sequence that comprises:
[0025] (a) the amino acid sequence selected from the group consisting of SEQ ID NOs 77 to 95;
[0026] (b) at least α% sequence identity to any one of SEQ ID NOs: 77 to 95; or
[0027] (c) has 1, 2, 3, 4, 5, 6, 7, 8, 9 or 10 (or more) single amino acid alterations (deletions, insertions, substitutions), which may be at separate locations or may be contiguous, as compared to the sequences of (a) or (b); and/or;
[0028] (d) when aligned with any of SEQ ID NOs: 77 to 95 using a pairwise alignment algorithm, each moving window of x amino acids from N-terminus to C-terminus (such that for an alignment that extends to p amino acids, where p>x, there are p−x+1 such windows) has at least x·y identical aligned amino acids, where: x is selected from 20, 25, 30, 35, 40, 45, 50, 60, 70, 80, 90, 100, 150, 200; y is selected from 0.50, 0.60, 0.70, 0.75, 0.80, 0.85, 0.90, 0.91, 0.92, 0.93, 0.94, 0.95, 0.96, 0.97, 0.98, 0.99; and if x·y is not an integer then it is rounded up to the nearest integer,
[0029] wherein the immunogenic polypeptide fragment has lower toxicity than the E. coli AcfD (orf3526) protein and wherein the immunogenic polypeptide fragment raises a substantially similar immune response in a subject as the E. coli AcfD (orf3526) protein.

[0030] The preferred pairwise alignment algorithm is the Needleman-Wunsch global alignment algorithm [7], using default parameters (e.g. with Gap opening penalty=10.0, and with Gap extension penalty=0.5, using the EBLOSUM62 scoring matrix). This algorithm is conveniently implemented in the needle tool in the EMBOSS package [8].

[0031] These polypeptides include other detoxified variants of SEQ ID NOs 77 to 95, including allelic variants, polymorphic forms, homologs, orthologs, paralogs, mutants, etc.

[0032] The value of a may be selected from 50%, 60%, 65%, 70%, 75%, 80%, 85%, 87.5%, 90%, 91%, 92%, 93%, 94%, 95%, 96%, 97%, 98%, 99%, 99.5% or more.

[0033] The immunogenic polypeptide fragment in certain embodiments will not comprise at least the first 10 N-terminal amino acids of the E. coli AcfD (orf3526) protein, at least the first 20 N-terminal amino acids of the E. coli AcfD (orf3526) protein, at least the first 25 N-terminal amino acids of the E. coli AcfD (orf3526) protein, at least the first 30 N-terminal amino acids of the E. coli AcfD (orf3526) protein, or at least the first 33 N-terminal amino acids of the E. coli AcfD (orf3526) protein.

[0034] The immunogenic polypeptide fragment in certain embodiments (which may be combined with the preceding embodiments) will not comprise at least the last 125 C-terminal amino acids of the E. coli AcfD (orf3526) protein, at least the last 150 C-terminal amino acids of the E. coli AcfD (orf3526) protein, at least the last 175 C-terminal amino acids of the E. coli AcfD (orf3526) protein, at least the last 200 C-terminal amino acids of the E. coli AcfD (orf3526) protein, at least the last 210 C-terminal amino acids of the E. coli AcfD (orf3526) protein, or at least the last 217 C-terminal amino acids of the E. coli AcfD (orf3526) protein.

[0035] The invention further provides an immunogenic polypeptide fragment comprising an E. coli AcfD (orf3526) polypeptide wherein the immunogenic polypeptide comprises an amino acid sequence that comprises:
[0036] (a) the amino acid sequence selected from the group consisting of SEQ ID NOs 20 to 76;
[0037] (b) at least α% sequence identity to any one of SEQ ID NOs: 20 to 76; or
[0038] (c) has 1, 2, 3, 4, 5, 6, 7, 8, 9 or 10 (or more) single amino acid alterations (deletions, insertions, substitutions), which may be at separate locations or may be contiguous, as compared to the sequences of (a) or (b); and/or;
[0039] (d) when aligned with any of SEQ ID NOs: 20 to 76 using a pairwise alignment algorithm, each moving window of x amino acids from N-terminus to C-terminus (such that for an alignment that extends to p amino acids, where p>x, there are p−x+1 such windows) has at least x·y identical aligned amino acids, where: x is selected from 20, 25, 30, 35, 40, 45, 50, 60, 70, 80, 90, 100, 150, 200; y is selected from 0.50, 0.60, 0.70, 0.75, 0.80, 0.85, 0.90, 0.91, 0.92, 0.93, 0.94, 0.95, 0.96, 0.97, 0.98, 0.99; and if x·y is not an integer then it is rounded up to the nearest integer,
[0040] wherein the immunogenic polypeptide fragment raises a substantially similar immune response in a subject as the E. coli AcfD (orf3526) protein.

[0041] The preferred pairwise alignment algorithm is the Needleman-Wunsch global alignment algorithm [7], using default parameters (e.g. with Gap opening penalty=10.0, and with Gap extension penalty=0.5, using the EBLOSUM62 scoring matrix). This algorithm is conveniently implemented in the needle tool in the EMBOSS package [8].

[0042] These polypeptides include other variants of SEQ ID NOs 20 to 76, including allelic variants, polymorphic forms, homologs, orthologs, paralogs, mutants, etc.

[0043] The value of a may be selected from 50%, 60%, 65%, 70%, 75%, 80%, 85%, 87.5%, 90%, 91%, 92%, 93%, 94%, 95%, 96%, 97%, 98%, 99%, 99.5% or more.

[0044] Exemplary fragments will not comprise at least the last 100 C-terminal amino acids of the E. coli AcfD (orf3526) protein, at least the last 200 C-terminal amino acids of the E. coli AcfD (orf3526) protein, at least the last 300 C-terminal amino acids of the E. coli AcfD (orf3526) protein, at least the last 400 C-terminal amino acids of the E. coli AcfD (orf3526) protein, at least the last 500 C-terminal amino acids of the E. coli AcfD (orf3526) protein, at least the last 600 C-terminal amino acids of the E. coli AcfD (orf3526) protein, at least the last 700 C-terminal amino acids of the E. coli AcfD (orf3526) protein, at least the last 750 C-terminal amino acids of the E. coli AcfD (orf3526) protein, or at least the last 758 C-terminal amino acids of the E. coli AcfD (orf3526) protein or does not comprise at least the first 100 N-terminal amino acids of the E. coli AcfD (orf3526) protein, at least the first 200 N-terminal amino acids of the E. coli AcfD (orf3526) protein, at least the first 300 N-terminal amino acids of the E. coli AcfD (orf3526) protein, at least the first 400 N-terminal amino acids of the E. coli AcfD (orf3526) protein, at least the first 500 N-terminal amino acids of the E. coli AcfD (orf3526) protein, at least the first 600 N-terminal amino acids of the E. coli AcfD (orf3526) protein, at least the first 700 N-terminal amino acids of the E. coli AcfD (orf3526) protein, at least the first 750 N-terminal amino acids of the E. coli AcfD (orf3526) protein, or at least the first 760 N-terminal amino acids of the E. coli AcfD (orf3526) protein.

[0045] The foregoing immunogenic polypeptides may further contain a deletion relative to the E. coli AcfD (orf3526) protein which increases solubility of the immunogenic polypeptide as compared to the E. coli AcfD (orf3526) protein while the immunogenic polypeptide still raises a substantially similar immune response in a subject as the E. coli AcfD (orf3526) protein.

[0046] Exemplary deletions that increase the solubility include removal of substantially all of the N-terminal amino acids up to the gly-ser region, removal of all or a part of the N-terminal proline-rich repeat, or both. The immunogenic polypeptide of claim 8, wherein the deletion is removal of at least the first 20 N-terminal amino acids as compared to the E. coli AcfD (orf3526) protein, at least the first 20 N-terminal amino acids as compared to the E. coli AcfD (orf3526) protein, at least the first 30 N-terminal amino acids as compared to the E. coli AcfD (orf3526) protein, at least the first 38 N-terminal amino acids as compared to the E. coli AcfD (orf3526) protein, at least the first 40 N-terminal amino acids as compared to the E. coli AcfD (orf3526) protein, at least the first 50 N-terminal amino acids as compared to the E. coli AcfD (orf3526) protein, at least the first 60 N-terminal amino acids as compared to the E. coli AcfD (orf3526) protein, at least the first 70 N-terminal amino acids as compared to the E. coli AcfD (orf3526) protein, at least the first 80 N-terminal amino acids as compared to the E. coli AcfD (orf3526) protein, at least the first 90 N-terminal amino acids as compared to the E. coli AcfD (orf3526) protein, or at least the first 94 N-terminal amino acids as compared to the E. coli AcfD (orf3526) protein.

[0047] The E. coli AcfD (orf3526) protein may have an amino acid sequence selected from the group consisting of SEQ ID NOs:1-19.

[0048] The invention also provides an immunogenic polypeptide fragment of an E. coli AcfD (orf3526) polypeptide wherein the immunogenic polypeptide fragment comprises an amino acid sequence that comprises:
[0049] (a) the amino acid sequence selected from the group consisting of SEQ ID NOs 77 to 95;
[0050] (b) at least α% sequence identity to any one of SEQ ID NOs: 77 to 95; or
[0051] (c) has 1, 2, 3, 4, 5, 6, 7, 8, 9 or 10 (or more) single amino acid alterations (deletions, insertions, substitutions), which may be at separate locations or may be contiguous, as compared to the sequences of (a) or (b); and/or;
[0052] (d) when aligned with any of SEQ ID NOs: 77 to 95 using a pairwise alignment algorithm, each moving window of x amino acids from N-terminus to C-terminus (such that for an alignment that extends to p amino acids, where p>x, there are p−x+1 such windows) has at least x·y identical aligned amino acids, where: x is selected from 20, 25, 30, 35, 40, 45, 50, 60, 70, 80, 90, 100, 150, 200; y is selected from 0.50, 0.60, 0.70, 0.75, 0.80, 0.85, 0.90, 0.91, 0.92, 0.93, 0.94, 0.95, 0.96, 0.97, 0.98, 0.99; and if x·y is not an integer then it is rounded up to the nearest integer,
[0053] wherein the immunogenic polypeptide fragment raises a substantially similar immune response in a subject as the E. coli AcfD (orf3526) protein.

[0054] The preferred pairwise alignment algorithm is the Needleman-Wunsch global alignment algorithm [7], using default parameters (e.g. with Gap opening penalty=10.0, and with Gap extension penalty=0.5, using the EBLOSUM62 scoring matrix). This algorithm is conveniently implemented in the needle tool in the EMBOSS package [8].

[0055] These polypeptides include other variants of SEQ ID NOs 77 to 95, including allelic variants, polymorphic forms, homologs, orthologs, paralogs, mutants, etc.

[0056] The value of a may be selected from 50%, 60%, 65%, 70%, 75%, 80%, 85%, 87.5%, 90%, 91%, 92%, 93%, 94%, 95%, 96%, 97%, 98%, 99%, 99.5% or more.

[0057] The immunogenic polypeptide fragment in certain embodiments will not comprise at least the first 10 N-terminal amino acids of the E. coli AcfD (orf3526) protein, at least the first 20 N-terminal amino acids of the E. coli AcfD (orf3526) protein, at least the first 25 N-terminal amino acids of the E. coli AcfD (orf3526) protein, at least the first 30 N-terminal amino acids of the E. coli AcfD (orf3526) protein, or at least the first 33 N-terminal amino acids of the E. coli AcfD (orf3526) protein.

[0058] The immunogenic polypeptide fragment in certain embodiments (which may be combined with the preceding embodiments) will not comprise at least the last 125 C-terminal amino acids of the E. coli AcfD (orf3526) protein, at least the last 150 C-terminal amino acids of the E. coli AcfD (orf3526) protein, at least the last 175 C-terminal amino acids of the E. coli AcfD (orf3526) protein, at least the last 200 C-terminal amino acids of the E. coli AcfD (orf3526) protein, at least the last 210 C-terminal amino acids of the E. coli AcfD (orf3526) protein, or at least the last 217 C-terminal amino acids of the E. coli AcfD (orf3526) protein.

[0059] The invention additionally provides an immunogenic composition that comprises an immunogenic polypeptide fragment of an E. coli AcfD (orf3526) polypeptide wherein the immunogenic polypeptide fragment comprises an amino acid sequence that comprises at least α% sequence identity to any one of SEQ ID NOs: 77 to 95, wherein the immunogenic polypeptide fragment raises a substantially similar immune response in a subject as the E. coli AcfD (orf3526) protein and wherein the immunogenic polypeptide fragment does not comprise at least the last 125 C-terminal amino acids of the E. coli AcfD (orf3526) protein, at least the last 150 C-terminal amino acids of the E. coli AcfD (orf3526) protein, at least the last 175 C-terminal amino acids of the E. coli AcfD (orf3526) protein, at least the last 200 C-terminal amino acids of the E. coli AcfD (orf3526) protein, at least the last 210 C-terminal amino acids of the E. coli AcfD (orf3526) protein, or at least the last 217 C-terminal amino acids of the E. coli AcfD (orf3526) protein.

[0060] The preferred pairwise alignment algorithm is the Needleman-Wunsch global alignment algorithm [7], using default parameters (e.g. with Gap opening penalty=10.0, and with Gap extension penalty=0.5, using the EBLOSUM62 scoring matrix). This algorithm is conveniently implemented in the needle tool in the EMBOSS package [8].

[0061] These polypeptides include other variants of SEQ ID NOs 77 to 95, including allelic variants, polymorphic forms, homologs, orthologs, paralogs, mutants, etc.

[0062] The value of a may be selected from 50%, 60%, 65%, 70%, 75%, 80%, 85%, 87.5%, 90%, 91%, 92%, 93%, 94%, 95%, 96%, 97%, 98%, 99%, 99.5% or more.

[0063] The immunogenic polypeptide fragment of the immunogenic composition in certain embodiments will not comprise at least the first 10 N-terminal amino acids of the E. coli AcfD (orf3526) protein, at least the first 20 N-terminal amino acids of the E. coli AcfD (orf3526) protein, at least the first 25 N-terminal amino acids of the E. coli AcfD (orf3526) protein, at least the first 30 N-terminal amino acids of the E. coli AcfD (orf3526) protein, or at least the first 33 N-terminal amino acids of the E. coli AcfD (orf3526) protein.

[0064] The immunogenic composition may further comprise an adjuvant which may in certain embodiments comprise 1-12% by volume of a metabolizable oil, and 0.2% to 2.5% by weight of an emulsifying agent, wherein the metabolizable oil and the emulsifying agent are present in the form of an oil-in-water emulsion having oil droplets substantially all of which are less than 1 micron in diameter; 4-5% by volume of squalene, and (b) about 1% of an emulsifying agent comprising polyoxyethylenesorbitan monooleate and sorbitan trioleate, wherein the squalene and the emulsifying agent are present in the form of an oil-in-water emulsion having oil droplets substantially all of which are less than 1 micron in diameter; or MF59 (TM).

[0065] The foregoing detoxified immunogenic polypeptides and immunogenic polypeptide fragments preferably retain at least one epitope or immunogenic fragment of SEQ ID NOs 1 to 19. An epitope within a fragment may be a B-cell epitope and/or a T-cell epitope. Such epitopes can be identified empirically (e.g. using PEPSCAN [9,10] or similar methods), or they can be predicted (e.g. using the Jameson-Wolf antigenic index [11], matrix-based approaches [12], MAPITOPE [13], TEPITOPE [14,15], neural networks [16], OptiMer & EpiMer [17, 18], ADEPT [19], Tsites [20], hydrophilicity [21], antigenic index [22] or the methods disclosed in references 23-27, etc.). Epitopes are the parts of an antigen that are recognised by and bind to the antigen binding sites of antibodies or T-cell receptors, and they may also be referred to as “antigenic determinants”.

[0066] The foregoing detoxified immunogenic polypeptides and immunogenic polypeptide fragments include, without limitation, immunogenic polypeptides that, when administered to a subject in a suitable composition which can include an adjuvant (including without limitation any of the adjuvants listed or discussed in the section “Immunogenic compositions and medicaments” below), or a suitable carrier coupled to the polypeptide, induces an antibody or T-cell mediated immune response that recognizes the isolated full length polypeptide SEQ ID NOs 1 to 19, respectively, from which the immunogenic polypeptide is derived.

[0067] The foregoing detoxified immunogenic polypeptides and immunogenic polypeptide fragments include, without limitation, immunogenic polypeptides that, when administered to a subject in a suitable composition which can include an adjuvant (including without limitation any of the adjuvants listed or discussed in the section “Immunogenic compositions and medicaments” below), or a suitable carrier coupled to the polypeptide, induces an antibody or T-cell mediated immune response that recognizes the isolated full length polypeptide SEQ ID NOs 1 to 19, respectively, from which the immunogenic fragment is derived.

[0068] The foregoing detoxified immunogenic polypeptides and immunogenic polypeptide fragments include, without limitation, immunogenic polypeptides that, when administered to a subject in a suitable composition which can include an adjuvant (including without limitation any of the adjuvants listed or discussed in the section “Immunogenic compositions and medicaments” below), or a suitable carrier coupled to the polypeptide, induces an antibody or T-cell mediated immune response that recognizes the isolated full length polypeptide SEQ ID NOs 1 to 19, respectively, from which the immunogenic fragment is derived.

[0069] A detoxified polypeptide of the invention may, compared to any one of SEQ ID NOs 1 to 19, include one or more (e.g. 1, 2, 3, 4, 5, 6, 7, 8, 9, etc.) amino acid substitutions, such as conservative substitutions (i.e. substitutions of one amino acid with another which has a related side chain). Genetically-encoded amino acids are generally divided into four families: (1) acidic i.e. aspartate, glutamate; (2) basic i.e. lysine, arginine, histidine; (3) non-polar i.e. alanine, valine, leucine, isoleucine, proline, phenylalanine, methionine, tryptophan; and (4) uncharged polar i.e. glycine, asparagine, glutamine, cysteine, serine, threonine, tyrosine. Phenylalanine, tryptophan, and tyrosine are sometimes classified jointly as aromatic amino acids. In general, substitution of single amino acids within these families does not have a major effect on the biological activity.

[0070] A detoxified polypeptide may include one or more (e.g. 1, 2, 3, 4, 5, 6, 7, 8, 9, etc.) single amino acid deletions relative to any one of SEQ ID NOs 1 to 19. Similarly, a polypeptides may include one or more (e.g. 1, 2, 3, 4, 5, 6, 7, 8, 9, etc.) insertions (e.g. each of 1, 2, 3, 4 or 5 amino acids) relative to any one of SEQ ID NOs 1 to 19.

[0071] In general, when a detoxified polypeptide or immunogenic polypeptide fragment of the invention comprises a sequence that is not identical to a complete one of SEQ ID NOs 1 to 19 (e.g. when it comprises a sequence listing with <100% sequence identity thereto, or when it comprises a fragment thereof) it is preferred that the polypeptide can elicit an antibody that recognises a polypeptide consisting of the complete SEQ ID sequence i.e. the antibody binds to one or more of said SEQ ID NOs 1 to 19. Such antibody may bind specifically to SEQ ID NOs 1 to 19, respectively while not binding to non-AcfD (orf3526) proteins with affinity significantly higher than the antibody's non-specific affinity to human serum albumin as a non-specific binding reference standard.

[0072] Polypeptides used with the invention can take various forms (e.g. native, fusions, glycosylated, non-glycosylated, lipidated, non-lipidated, phosphorylated, non-phosphorylated, myristoylated, non-myristoylated, monomeric, multimeric, particulate, denatured, etc.). For instance, a polypeptide of the invention may have a lipidated N-terminal cysteine (e.g. Cys-24 of SEQ ID NOs: 1 to 19).

[0073] Polypeptides used with the invention can be prepared by various means (e.g. recombinant expression, purification from cell culture, chemical synthesis, etc.). Recombinantly-expressed proteins are preferred.

[0074] Polypeptides used with the invention are preferably provided in purified or substantially purified form i.e. substantially free from other polypeptides (e.g. free from naturally-occurring polypeptides), particularly from other E. coli or host cell polypeptides, and are generally at least about 50% pure (by weight), and usually at least about 90% pure i.e. less than about 50%, and more preferably less than about 10% (e.g. 5%) of a composition is made up of other expressed polypeptides. Thus the antigens in the compositions are separated from the whole organism with which the molecule is expressed.

[0075] Polypeptides used with the invention are preferably E. coli polypeptides. Such polypeptides may be further selected from NMEC, APEC, UPEC, EAEC, EIEC, EPEC and ETEC E. coli polypeptides.

[0076] The term “polypeptide” refers to amino acid polymers of any length. The polymer may be linear or branched, it may comprise modified amino acids, and it may be interrupted by non-amino acids. The terms also encompass an amino acid polymer that has been modified naturally or by intervention; for example, disulfide bond formation, glycosylation, lipidation, acetylation, phosphorylation, or any other manipulation or modification, such as conjugation with a labeling component. Also included are, for example, polypeptides containing one or more analogs of an amino acid (including, for example, unnatural amino acids, etc.), as well as other modifications known in the art. Polypeptides can occur as single chains or associated chains.

[0077] The invention provides polypeptides comprising a sequence —P-Q- or -Q-P—, wherein: —P— is an amino acid sequence as defined above and -Q- is not a sequence as defined above i.e. the invention provides fusion proteins. Where the N-terminus codon of —P— is not ATG, but this codon is not present at the N-terminus of a polypeptide, it will be translated as the standard amino acid for that codon rather than as a Met. Where this codon is at the N-terminus of a polypeptide, however, it will be translated as Met. Examples of -Q- moieties include, but are not limited to, histidine tags (i.e. Hisₙ where n=3, 4, 5, 6, 7, 8, 9, 10 or more), a maltose-binding protein, or glutathione-S-transferase (GST).

[0078] The invention also provides an oligomeric protein comprising a polypeptide of the invention. The oligomer may be a dimer, a trimer, a tetramer, etc. The oligomer may be a homo-oligomer or a hetero-oligomer. Polypeptides in the oligomer may be covalently or non-covalently associated.

[0079] Comparison of the immune response raised in a subject by the polypeptide with the immune response raised by the full length protein may be carried out use by any means available to one of skill in the art. One simple method as used in the examples below involves immunization of a model subject such as mouse and then challenge with a lethal dose of E. coli. For proper comparison, one of skill in the art would naturally select the same adjuvant such as Freund's complete adjuvant. In such a test the immunogenic polypeptide fragments of the present invention will raise a substantially similar immune response in a subject (i.e., will provide substantially the same protection against the lethal challenge) if, for example, the polypeptide provides at least 70% of the protection provided by the full length protein, at least 80% of the protection provided by the full length protein, at least 85% of the protection provided by the full length protein, at least 90% of the protection provided by the full length protein, at least 95% of the protection provided by the full length protein, at least 97% of the protection provided by the full length protein, at least 98% of the protection provided by the full length protein, or at least 99% of the protection provided by the full length protein.

[0080] The full length AcfD (orf3526) protein against which the immunogenic polypeptide fragment would be compared (for solubility, toxicity and immune response raised) may be any representative E. coli AcfD (orf3526) protein including without limitation SEQ ID NOs 1-19. In preferred embodiments, the AcfD (orf3526) protein will be the corresponding full length protein from which the immunogenic polypeptide fragment is obtained.

[0081] The invention also provides a process for producing a polypeptide of the invention, comprising the step of culturing a host cell transformed with nucleic acid of the invention under conditions which induce polypeptide expression. The polypeptide may then be purified e.g. from culture supernatants.

[0082] The invention provides an E. coli cell, containing a plasmid that encodes a polypeptide of the invention. The chromosome of the E. coli cell may include a homolog of AcfD (orf3526), or such a homolog may be absent, but in both cases the polypeptide of the invention can be expressed from the plasmid. The plasmid may include a gene encoding a marker, etc. These and other details of suitable plasmids are given below.

[0083] Although expression of the polypeptides of the invention may take place in an E. coli strain, the invention will usually use a heterologous host for expression. The heterologous host may be prokaryotic (e.g. a bacterium) or eukaryotic. Suitable hosts include, but are not limited to, Bacillus subtilis, Vibrio cholerae, Salmonella typhi, Salmonella typhimurium, Neisseria lactamica, Neisseria cinerea, Mycobacteria (e.g. M. tuberculosis), yeasts, etc.

[0084] The invention provides a process for producing a polypeptide of the invention, comprising the step of synthesising at least part of the polypeptide by chemical means.

[0085] Any and all of the foregoing proteins, polypeptides, hybrid polypeptides, epitopes and immunogenic fragments may be in any one of a number of forms including, without limitation, recombinant, isolated or substantially purified (from materials co-existing with such proteins, polypeptides, hybrid polypeptides, epitopes and immunogenic fragments in their natural state).

### Nucleic Acids

[0086] The invention also provides nucleic acid encoding polypeptides and hybrid polypeptides of the invention. It also provides nucleic acid comprising a nucleotide sequence that encodes one or more polypeptides or hybrid polypeptides of the invention.

[0087] The invention also provides nucleic acid comprising nucleotide sequences having sequence identity to such nucleotide sequences. Identity between sequences is preferably determined by the Smith-Waterman homology search algorithm as described above. Such nucleic acids include those using alternative codons to encode the same amino acid.

[0088] The invention also provides nucleic acid which can hybridize to these nucleic acids. Hybridization reactions can be performed under conditions of different “stringency”. Conditions that increase stringency of a hybridization reaction of widely known and published in the art (e.g. page 7.52 of reference 211). Examples of relevant conditions include (in order of increasing stringency): incubation temperatures of 25° C., 37° C., 50° C., 55° C. and 68° C.; buffer concentrations of 10×SSC, 6×SSC, 1×SSC, 0.1×SSC (where SSC is 0.15 M NaCl and 15 mM citrate buffer) and their equivalents using other buffer systems; formamide concentrations of 0%, 25%, 50%, and 75%; incubation times from 5 minutes to 24 hours; 1, 2, or more washing steps; wash incubation times of 1, 2, or 15 minutes; and wash solutions of 6×SSC, 1×SSC, 0.1×SSC, or de-ionized water. Hybridization techniques and their optimization are well known in the art (e.g. see refs 28, 29, 211, 213, etc.].

[0089] In some embodiments, nucleic acid of the invention hybridizes to a target under low stringency conditions; in other embodiments it hybridizes under intermediate stringency conditions; in preferred embodiments, it hybridizes under high stringency conditions. An exemplary set of low stringency hybridization conditions is 50° C. and 10×SSC. An exemplary set of intermediate stringency hybridization conditions is 55° C. and 1×SSC. An exemplary set of high stringency hybridization conditions is 68° C. and 0.1×SSC.

[0090] The invention includes nucleic acid comprising sequences complementary to these sequences (e.g. for antisense or probing, or for use as primers).

[0091] Nucleic acids of the invention can be used in hybridisation reactions (e.g. Northern or Southern blots, or in nucleic acid microarrays or ‘gene chips’) and amplification reactions (e.g. PCR, SDA, SSSR, LCR, TMA, NASBA, etc.) and other nucleic acid techniques.

[0092] Nucleic acid according to the invention can take various forms (e.g. single-stranded, double-stranded, vectors, primers, probes, labelled etc.). Nucleic acids of the invention may be circular or branched, but will generally be linear. Unless otherwise specified or required, any embodiment of the invention that utilizes a nucleic acid may utilize both the double-stranded form and each of two complementary single-stranded forms which make up the double-stranded form. Primers and probes are generally single-stranded, as are antisense nucleic acids.

[0093] Nucleic acids of the invention are preferably provided in purified or substantially purified form i.e. substantially free from other nucleic acids (e.g. free from naturally-occurring nucleic acids), particularly from other E. coli or host cell nucleic acids, generally being at least about 50% pure (by weight), and usually at least about 90% pure. Nucleic acids of the invention are preferably E. coli nucleic acids.

[0094] Nucleic acids of the invention may be prepared in many ways e.g. by chemical synthesis (e.g. phosphoramidite synthesis of DNA) in whole or in part, by digesting longer nucleic acids using nucleases (e.g. restriction enzymes), by joining shorter nucleic acids or nucleotides (e.g. using ligases or polymerases), from genomic or cDNA libraries, etc.

[0095] Nucleic acid of the invention may be attached to a solid support (e.g. a bead, plate, filter, film, slide, microarray support, resin, etc.). Nucleic acid of the invention may be labelled e.g. with a radioactive or fluorescent label, or a biotin label. This is particularly useful where the nucleic acid is to be used in detection techniques e.g. where the nucleic acid is a primer or as a probe.

[0096] The term “nucleic acid” includes in general means a polymeric form of nucleotides of any length, which contain deoxyribonucleotides, ribonucleotides, and/or their analogs. It includes DNA, RNA, DNA/RNA hybrids. It also includes DNA or RNA analogs, such as those containing modified backbones (e.g. peptide nucleic acids (PNAs) or phosphorothioates) or modified bases. Thus the invention includes mRNA, tRNA, rRNA, ribozymes, DNA, cDNA, recombinant nucleic acids, branched nucleic acids, plasmids, vectors, probes, primers, etc. Where nucleic acid of the invention takes the form of RNA, it may or may not have a 5′ cap.

[0097] Nucleic acids of the invention may be part of a vector i.e. part of a nucleic acid construct designed for transduction/transfection of one or more cell types. Vectors may be, for example, “cloning vectors” which are designed for isolation, propagation and replication of inserted nucleotides, “expression vectors” which are designed for expression of a nucleotide sequence in a host cell, “viral vectors” which is designed to result in the production of a recombinant virus or virus-like particle, or “shuttle vectors”, which comprise the attributes of more than one type of vector. Preferred vectors are plasmids, as mentioned above. A “host cell” includes an individual cell or cell culture which can be or has been a recipient of exogenous nucleic acid. Host cells include progeny of a single host cell, and the progeny may not necessarily be completely identical (in morphology or in total DNA complement) to the original parent cell due to natural, accidental, or deliberate mutation and/or change. Host cells include cells transfected or infected in vivo or in vitro with nucleic acid of the invention.

[0098] Where a nucleic acid is DNA, it will be appreciated that “U” in a RNA sequence will be replaced by “T” in the DNA. Similarly, where a nucleic acid is RNA, it will be appreciated that “T” in a DNA sequence will be replaced by “U” in the RNA.

[0099] The term “complement” or “complementary” when used in relation to nucleic acids refers to Watson-Crick base pairing. Thus the complement of C is G, the complement of G is C, the complement of A is T (or U), and the complement of T (or U) is A. It is also possible to use bases such as I (the purine inosine) e.g. to complement pyrimidines (C or T).

[0100] Nucleic acids of the invention can be used, for example: to produce polypeptides; as hybridization probes for the detection of nucleic acid in biological samples; to generate additional copies of the nucleic acids; to generate ribozymes or antisense oligonucleotides; as single-stranded DNA primers or probes; or as triple-strand forming oligonucleotides.

[0101] The invention provides a process for producing nucleic acid of the invention, wherein the nucleic acid is synthesised in part or in whole using chemical means.

[0102] The invention provides vectors comprising nucleotide sequences of the invention (e.g. cloning or expression vectors) and host cells transformed with such vectors.

[0103] Nucleic acid amplification according to the invention may be quantitative and/or real-time.

[0104] For certain embodiments of the invention, nucleic acids are preferably at least 7 nucleotides in length (e.g. 8, 9, 10, 11, 12, 13, 14, 15, 16, 17, 18, 19, 20, 21, 22, 23, 24, 25, 26, 27, 28, 29, 30, 31, 32, 33, 34, 35, 36, 37, 38, 39, 40, 45, 50, 55, 60, 65, 70, 75, 80, 90, 100, 110, 120, 130, 140, 150, 160, 170, 180, 190, 200, 225, 250, 275, 300 nucleotides or longer).

[0105] For certain embodiments of the invention, nucleic acids are preferably at most 500 nucleotides in length (e.g. 450, 400, 350, 300, 250, 200, 150, 140, 130, 120, 110, 100, 90, 80, 75, 70, 65, 60, 55, 50, 45, 40, 39, 38, 37, 36, 35, 34, 33, 32, 31, 30, 29, 28, 27, 26, 25, 24, 23, 22, 21, 20, 19, 18, 17, 16, 15 nucleotides or shorter).

[0106] Primers and probes of the invention, and other nucleic acids used for hybridization, are preferably between 10 and 30 nucleotides in length (e.g. 10, 11, 12, 13, 14, 15, 16, 17, 18, 19, 20, 21, 22, 23, 24, 25, 26, 27, 28, 29, or 30 nucleotides).

### Immunogenic Compositions and Medicaments

[0107] Polypeptides of the invention are useful as active ingredients (immunogens) in immunogenic compositions, and such compositions may be useful as vaccines. Vaccines according to the invention may either be prophylactic (i.e. to prevent infection) or therapeutic (i.e. to treat infection), but will typically be prophylactic.

[0108] Immunogenic compositions will be pharmaceutically acceptable. They will usually include components in addition to the antigens e.g. they typically include one or more pharmaceutical carrier(s), excipient(s) and/or adjuvant(s). A thorough discussion of carriers and excipients is available in ref. 208. Thorough discussions of vaccine adjuvants are available in refs. 30 and 31.

[0109] Compositions will generally be administered to a mammal in aqueous form. Prior to administration, however, the composition may have been in a non-aqueous form. For instance, although some vaccines are manufactured in aqueous form, then filled and distributed and administered also in aqueous form, other vaccines are lyophilised during manufacture and are reconstituted into an aqueous form at the time of use. Thus a composition of the invention may be dried, such as a lyophilised formulation.

[0110] The composition may include preservatives such as thiomersal or 2-phenoxyethanol. It is preferred, however, that the vaccine should be substantially free from (i.e. less than 5 μg/ml) mercurial material e.g. thiomersal-free. Vaccines containing no mercury are more preferred. Preservative-free vaccines are particularly preferred.

[0111] To improve thermal stability, a composition may include a temperature protective agent.

[0112] To control tonicity, it is preferred to include a physiological salt, such as a sodium salt. Sodium chloride (NaCl) is preferred, which may be present at between 1 and 20 mg/ml e.g. about 10±2 mg/ml NaCl. Other salts that may be present include potassium chloride, potassium dihydrogen phosphate, disodium phosphate dehydrate, magnesium chloride, calcium chloride, etc.

[0113] Compositions will generally have an osmolality of between 200 mOsm/kg and 400 mOsm/kg, preferably between 240-360 mOsm/kg, and will more preferably fall within the range of 290-310 mOsm/kg.

[0114] Compositions may include one or more buffers. Typical buffers include: a phosphate buffer; a Tris buffer; a borate buffer; a succinate buffer; a histidine buffer (particularly with an aluminum hydroxide adjuvant); or a citrate buffer. Buffers will typically be included in the 5-20 mM range.

[0115] The pH of a composition will generally be between 5.0 and 8.1, and more typically between 6.0 and 8.0 e.g. 6.5 and 7.5, or between 7.0 and 7.8.

[0116] The composition is preferably sterile. The composition is preferably non-pyrogenic e.g. containing <1 EU (endotoxin unit, a standard measure) per dose, and preferably <0.1 EU per dose. The composition is preferably gluten free.

[0117] The composition may include material for a single immunisation, or may include material for multiple immunisations (i.e. a ‘multidose’ kit). The inclusion of a preservative is preferred in multidose arrangements. As an alternative (or in addition) to including a preservative in multidose compositions, the compositions may be contained in a container having an aseptic adaptor for removal of material.

[0118] Human vaccines are typically administered in a dosage volume of about 0.5 ml, although a half dose (i.e. about 0.25 ml) may be administered to children.

[0119] Immunogenic compositions of the invention may also comprise one or more immunoregulatory agents. Preferably, one or more of the immunoregulatory agents include one or more adjuvants. The adjuvants may include a TH1 adjuvant and/or a TH2 adjuvant, further discussed below.

[0120] Adjuvants which may be used in compositions of the invention include, but are not limited to:

[0121] A. Mineral-Containing Compositions

[0122] Mineral containing compositions suitable for use as adjuvants in the invention include mineral salts, such as aluminium salts and calcium salts (or mixtures thereof). Calcium salts include calcium phosphate (e.g. the “CAP” particles disclosed in ref. 32). Aluminum salts include hydroxides, phosphates, sulfates, etc., with the salts taking any suitable form (e.g. gel, crystalline, amorphous, etc.). Adsorption to these salts is preferred. The mineral containing compositions may also be formulated as a particle of metal salt [33].

[0123] The adjuvants known as aluminum hydroxide and aluminum phosphate may be used. These names are conventional, but are used for convenience only, as neither is a precise description of the actual chemical compound which is present (e.g. see chapter 9 of reference 30). The invention can use any of the “hydroxide” or “phosphate” adjuvants that are in general use as adjuvants. The adjuvants known as “aluminium hydroxide” are typically aluminium oxyhydroxide salts, which are usually at least partially crystalline. The adjuvants known as “aluminium phosphate” are typically aluminium hydroxyphosphates, often also containing a small amount of sulfate (i.e. aluminium hydroxyphosphate sulfate). They may be obtained by precipitation, and the reaction conditions and concentrations during precipitation influence the degree of substitution of phosphate for hydroxyl in the salt.

[0124] A fibrous morphology (e.g. as seen in transmission electron micrographs) is typical for aluminium hydroxide adjuvants. The pI of aluminium hydroxide adjuvants is typically about 11 i.e. the adjuvant itself has a positive surface charge at physiological pH. Adsorptive capacities of between 1.8-2.6 mg protein per mg Al⁺⁺⁺ at pH 7.4 have been reported for aluminium hydroxide adjuvants.

[0125] Aluminium phosphate adjuvants generally have a PO₄/Al molar ratio between 0.3 and 1.2, preferably between 0.8 and 1.2, and more preferably 0.95±0.1. The aluminium phosphate will generally be amorphous, particularly for hydroxyphosphate salts. A typical adjuvant is amorphous aluminium hydroxyphosphate with PO₄/Al molar ratio between 0.84 and 0.92, included at 0.6 mg Al³⁺/ml. The aluminium phosphate will generally be particulate (e.g. plate-like morphology as seen in transmission electron micrographs). Typical diameters of the particles are in the range 0.5-20 μm (e.g. about 5-10 μm) after any antigen adsorption. Adsorptive capacities of between 0.7-1.5 mg protein per mg Al⁺⁺⁺ at pH 7.4 have been reported for aluminium phosphate adjuvants.

[0126] The point of zero charge (PZC) of aluminium phosphate is inversely related to the degree of substitution of phosphate for hydroxyl, and this degree of substitution can vary depending on reaction conditions and concentration of reactants used for preparing the salt by precipitation. PZC is also altered by changing the concentration of free phosphate ions in solution (more phosphate=more acidic PZC) or by adding a buffer such as a histidine buffer (makes PZC more basic). Aluminium phosphates used according to the invention will generally have a PZC of between 4.0 and 7.0, more preferably between 5.0 and 6.5 e.g. about 5.7.

[0127] Suspensions of aluminium salts used to prepare compositions of the invention may contain a buffer (e.g. a phosphate or a histidine or a Tris buffer), but this is not always necessary. The suspensions are preferably sterile and pyrogen-free. A suspension may include free aqueous phosphate ions e.g. present at a concentration between 1.0 and 20 mM, preferably between 5 and 15 mM, and more preferably about 10 mM. The suspensions may also comprise sodium chloride.

[0128] The invention can use a mixture of both an aluminium hydroxide and an aluminium phosphate. In this case there may be more aluminium phosphate than hydroxide e.g. a weight ratio of at least 2:1 e.g. ≧5:1, ≧6:1, ≧7:1, ≧8:1, ≧9:1, etc.

[0129] The concentration of Al⁺⁺⁺ in a composition for administration to a patient is preferably less than 10 mg/ml e.g. ≦5 mg/ml, ≦4 mg/ml, ≦3 mg/ml, ≦2 mg/ml, ≦1 mg/ml, etc. A preferred range is between 0.3 and 1 mg/ml. A maximum of 0.85 mg/dose is preferred.

[0130] B. Oil Emulsions

[0131] Oil emulsion compositions suitable for use as adjuvants in the invention include squalene-water emulsions, such as MF59 [Chapter 10 of ref. 30; see also ref. 34] (5% Squalene, 0.5% Tween 80, and 0.5% Span 85, formulated into submicron particles using a microfluidizer). Complete Freund's adjuvant (CFA) and incomplete Freund's adjuvant (IFA) may also be used.

[0132] Various oil-in-water emulsion adjuvants are known, and they typically include at least one oil and at least one surfactant, with the oil(s) and surfactant(s) being biodegradable (metabolisable) and biocompatible. The oil droplets in the emulsion are generally less than 5 μm in diameter, and ideally have a sub-micron diameter, with these small sizes being achieved with a microfluidiser to provide stable emulsions. Droplets with a size less than 220 nm are preferred as they can be subjected to filter sterilization.

[0133] The emulsion can comprise oils such as those from an animal (such as fish) or vegetable source. Sources for vegetable oils include nuts, seeds and grains. Peanut oil, soybean oil, coconut oil, and olive oil, the most commonly available, exemplify the nut oils. Jojoba oil can be used e.g. obtained from the jojoba bean. Seed oils include safflower oil, cottonseed oil, sunflower seed oil, sesame seed oil and the like. In the grain group, corn oil is the most readily available, but the oil of other cereal grains such as wheat, oats, rye, rice, teff, triticale and the like may also be used. 6-10 carbon fatty acid esters of glycerol and 1,2-propanediol, while not occurring naturally in seed oils, may be prepared by hydrolysis, separation and esterification of the appropriate materials starting from the nut and seed oils. Fats and oils from mammalian milk are metabolizable and may therefore be used in the practice of this invention. The procedures for separation, purification, saponification and other means necessary for obtaining pure oils from animal sources are well known in the art. Most fish contain metabolizable oils which may be readily recovered. For example, cod liver oil, shark liver oils, and whale oil such as spermaceti exemplify several of the fish oils which may be used herein. A number of branched chain oils are synthesized biochemically in 5-carbon isoprene units and are generally referred to as terpenoids. Shark liver oil contains a branched, unsaturated terpenoids known as squalene, 2,6,10,15,19,23-hexamethyl-2,6,10,14,18,22-tetracosahexaene, which is particularly preferred herein. Squalane, the saturated analog to squalene, is also a preferred oil. Fish oils, including squalene and squalane, are readily available from commercial sources or may be obtained by methods known in the art. Other preferred oils are the tocopherols (see below). Mixtures of oils can be used.

[0134] Surfactants can be classified by their ‘HLB’ (hydrophile/lipophile balance). Preferred surfactants of the invention have a HLB of at least 10, preferably at least 15, and more preferably at least 16. The invention can be used with surfactants including, but not limited to: the polyoxyethylene sorbitan esters surfactants (commonly referred to as the Tweens), especially polysorbate 20 and polysorbate 80; copolymers of ethylene oxide (EO), propylene oxide (PO), and/or butylene oxide (BO), sold under the DOWFAX™ tradename, such as linear EO/PO block copolymers; octoxynols, which can vary in the number of repeating ethoxy (oxy-1,2-ethanediyl) groups, with octoxynol-9 (Triton X-100, or t-octylphenoxypolyethoxyethanol) being of particular interest; (octylphenoxy)polyethoxyethanol (IGEPAL CA-630/NP-40); phospholipids such as phosphatidylcholine (lecithin); nonylphenol ethoxylates, such as the Tergitol™ NP series; polyoxyethylene fatty ethers derived from lauryl, cetyl, stearyl and oleyl alcohols (known as Brij surfactants), such as triethyleneglycol monolauryl ether (Brij 30); and sorbitan esters (commonly known as the SPANs), such as sorbitan trioleate (Span 85) and sorbitan monolaurate. Non-ionic surfactants are preferred. Preferred surfactants for including in the emulsion are Tween 80 (polyoxyethylene sorbitan monooleate), Span 85 (sorbitan trioleate), lecithin and Triton X-100.

[0135] Mixtures of surfactants can be used e.g. Tween 80/Span 85 mixtures. A combination of a polyoxyethylene sorbitan ester such as polyoxyethylene sorbitan monooleate (Tween 80) and an octoxynol such as t-octylphenoxypolyethoxyethanol (Triton X-100) is also suitable. Another useful combination comprises laureth 9 plus a polyoxyethylene sorbitan ester and/or an octoxynol.

[0136] Preferred amounts of surfactants (% by weight) are: polyoxyethylene sorbitan esters (such as Tween 80) 0.01 to 1%, in particular about 0.1%; octyl- or nonylphenoxy polyoxyethanols (such as Triton X-100, or other detergents in the Triton series) 0.001 to 0.1%, in particular 0.005 to 0.02%; polyoxyethylene ethers (such as laureth 9) 0.1 to 20%, preferably 0.1 to 10% and in particular 0.1 to 1% or about 0.5%.

[0137] Preferred emulsion adjuvants have an average droplets size of <1 μm e.g. ≦750 nm, ≦500 nm, ≦400 nm, ≦300 nm, ≦250 nm, ≦220 nm, >200 nm, or smaller. These droplet sizes can conveniently be achieved by techniques such as microfluidisation.

[0138] Specific oil-in-water emulsion adjuvants useful with the invention include, but are not limited to:
[0139] A submicron emulsion of squalene, Tween 80, and Span 85. The composition of the emulsion by volume can be about 5% squalene, about 0.5% polysorbate 80 and about 0.5% Span 85. In weight terms, these ratios become 4.3% squalene, 0.5% polysorbate 80 and 0.48% Span 85. This adjuvant is known as ‘MF59’ [35-37], as described in more detail in Chapter 10 of ref. 38 and chapter 12 of ref 39. The MF59 emulsion advantageously includes citrate ions e.g. 10 mM sodium citrate buffer.
[0140] An emulsion of squalene, a tocopherol, and Tween 80. The emulsion may include phosphate buffered saline. It may also include Span 85 (e.g. at 1%) and/or lecithin. These emulsions may have from 2 to 10% squalene, from 2 to 10% tocopherol and from 0.3 to 3% Tween 80, and the weight ratio of squalene:tocopherol is preferably ≦1 as this provides a more stable emulsion. Squalene and Tween 80 may be present volume ratio of about 5:2. One such emulsion can be made by dissolving Tween 80 in PBS to give a 2% solution, then mixing 90 ml of this solution with a mixture of (5 g of DL-α-tocopherol and 5 ml squalene), then microfluidising the mixture. The resulting emulsion may have submicron oil droplets e.g. with an average diameter of between 100 and 250 nm, preferably about 180 nm.
[0141] An emulsion of squalene, a tocopherol, and a Triton detergent (e.g. Triton X-100). The emulsion may also include a 3d-MPL (see below). The emulsion may contain a phosphate buffer.
[0142] An emulsion comprising a polysorbate (e.g. polysorbate 80), a Triton detergent (e.g. Triton X-100) and a tocopherol (e.g. an α-tocopherol succinate). The emulsion may include these three components at a mass ratio of about 75:11:10 (e.g. 750 μg/ml polysorbate 80, 110 μg/ml Triton X-100 and 100 μg/ml α-tocopherol succinate), and these concentrations should include any contribution of these components from antigens. The emulsion may also include squalene. The emulsion may also include a 3d-MPL (see below). The aqueous phase may contain a phosphate buffer.
[0143] An emulsion of squalane, polysorbate 80 and poloxamer 401 (“Pluronic™ L121”). The emulsion can be formulated in phosphate buffered saline, pH 7.4. This emulsion is a useful delivery vehicle for muramyl dipeptides, and has been used with threonyl-MDP in the “SAF-1” adjuvant [40] (0.05-1% Thr-MDP, 5% squalane, 2.5% Pluronic™ L121 and 0.2% polysorbate 80). It can also be used without the Thr-MDP, as in the “AF” adjuvant [41] (5% squalane, 1.25% Pluronic L121 and 0.2% polysorbate 80). Microfluidisation is preferred.
[0144] An emulsion comprising squalene, an aqueous solvent, a polyoxyethylene alkyl ether hydrophilic nonionic surfactant (e.g. polyoxyethylene (12) cetostearyl ether) and a hydrophobic nonionic surfactant (e.g. a sorbitan ester or mannide ester, such as sorbitan monoleate or ‘Span 80’). The emulsion is preferably thermoreversible and/or has at least 90% of the oil droplets (by volume) with a size less than 200 nm [42]. The emulsion may also include one or more of: alditol; a cryoprotective agent (e.g. a sugar, such as dodecylmaltoside and/or sucrose); and/or an alkylpolyglycoside. Such emulsions may be lyophilized.
[0145] An emulsion of squalene, poloxamer 105 and Abil-Care [43]. The final concentration (weight) of these components in adjuvanted vaccines are 5% squalene, 4% poloxamer 105 (pluronic polyol) and 2% Abil-Care 85 (Bis-PEG/PPG-16/16 PEG/PPG-16/16 dimethicone; caprylic/capric triglyceride).
[0146] An emulsion having from 0.5-50% of an oil, 0.1-10% of a phospholipid, and 0.05-5% of a non-ionic surfactant. As described in reference 44, preferred phospholipid components are phosphatidylcholine, phosphatidylethanolamine, phosphatidylserine, phosphatidylinositol, phosphatidylglycerol, phosphatidic acid, sphingomyelin and cardiolipin. Submicron droplet sizes are advantageous.
[0147] A submicron oil-in-water emulsion of a non-metabolisable oil (such as light mineral oil) and at least one surfactant (such as lecithin, Tween 80 or Span 80). Additives may be included, such as QuilA saponin, cholesterol, a saponin-lipophile conjugate (such as GPI-0100, described in reference 45, produced by addition of aliphatic amine to desacylsaponin via the carboxyl group of glucuronic acid), dimethyldioctadecylammonium bromide and/or N,N-dioctadecyl-N,N-bis(2-hydroxyethyl)propanediamine.
[0148] An emulsion in which a saponin (e.g. QuilA or QS21) and a sterol (e.g. a cholesterol) are associated as helical micelles [46].
[0149] An emulsion comprising a mineral oil, a non-ionic lipophilic ethoxylated fatty alcohol, and a non-ionic hydrophilic surfactant (e.g. an ethoxylated fatty alcohol and/or polyoxyethylene-polyoxypropylene block copolymer) [47].
[0150] An emulsion comprising a mineral oil, a non-ionic hydrophilic ethoxylated fatty alcohol, and a non-ionic lipophilic surfactant (e.g. an ethoxylated fatty alcohol and/or polyoxyethylene-polyoxypropylene block copolymer) [47].

[0151] In some embodiments an emulsion may be mixed with antigen extemporaneously, at the time of delivery, and thus the adjuvant and antigen may be kept separately in a packaged or distributed vaccine, ready for final formulation at the time of use. In other embodiments an emulsion is mixed with antigen during manufacture, and thus the composition is packaged in a liquid adjuvanted form. The antigen will generally be in an aqueous form, such that the vaccine is finally prepared by mixing two liquids. The volume ratio of the two liquids for mixing can vary (e.g. between 5:1 and 1:5) but is generally about 1:1. Where concentrations of components are given in the above descriptions of specific emulsions, these concentrations are typically for an undiluted composition, and the concentration after mixing with an antigen solution will thus decrease.

[0152] Where a composition includes a tocopherol, any of the α, β, γ, δ, ε or ξ tocopherols can be used, but α-tocopherols are preferred. The tocopherol can take several forms e.g. different salts and/or isomers. Salts include organic salts, such as succinate, acetate, nicotinate, etc. D-α-tocopherol and DL-α-tocopherol can both be used. Tocopherols are advantageously included in vaccines for use in elderly patients (e.g. aged 60 years or older) because vitamin E has been reported to have a positive effect on the immune response in this patient group [48]. They also have antioxidant properties that may help to stabilize the emulsions [49]. A preferred α-tocopherol is DL-α-tocopherol, and the preferred salt of this tocopherol is the succinate. The succinate salt has been found to cooperate with TNF-related ligands in vivo.

[0153] C. Saponin Formulations [Chapter 22 of Ref. 30]

[0154] Saponin formulations may also be used as adjuvants in the invention. Saponins are a heterogeneous group of sterol glycosides and triterpenoid glycosides that are found in the bark, leaves, stems, roots and even flowers of a wide range of plant species. Saponin from the bark of the Quillaia saponaria Molina tree have been widely studied as adjuvants. Saponin can also be commercially obtained from Smilax ornata (sarsaprilla), Gypsophilla paniculata (brides veil), and Saponaria officianalis (soap root). Saponin adjuvant formulations include purified formulations, such as QS21, as well as lipid formulations, such as ISCOMs. QS21 is marketed as Stimulon™.

[0155] Saponin compositions have been purified using HPLC and RP-HPLC. Specific purified fractions using these techniques have been identified, including QS7, QS17, QS18, QS21, QH-A, QH-B and QH-C. Preferably, the saponin is QS21. A method of production of QS21 is disclosed in ref. 50. Saponin formulations may also comprise a sterol, such as cholesterol [51].

[0156] Combinations of saponins and cholesterols can be used to form unique particles called immunostimulating complexs (ISCOMs) [chapter 23 of ref. 30]. ISCOMs typically also include a phospholipid such as phosphatidylethanolamine or phosphatidylcholine. Any known saponin can be used in ISCOMs. Preferably, the ISCOM includes one or more of QuilA, QHA & QHC. ISCOMs are further described in refs. 51-53. Optionally, the ISCOMS may be devoid of additional detergent [54].

[0157] A review of the development of saponin based adjuvants can be found in refs. 55 & 56.

[0158] D. Virosomes and Virus-Like Particles

[0159] Virosomes and virus-like particles (VLPs) can also be used as adjuvants in the invention. These structures generally contain one or more proteins from a virus optionally combined or formulated with a phospholipid. They are generally non-pathogenic, non-replicating and generally do not contain any of the native viral genome. The viral proteins may be recombinantly produced or isolated from whole viruses. These viral proteins suitable for use in virosomes or VLPs include proteins derived from influenza virus (such as HA or NA), Hepatitis B virus (such as core or capsid proteins), Hepatitis E virus, measles virus, Sindbis virus, Rotavirus, Foot-and-Mouth Disease virus, Retrovirus, Norwalk virus, human Papilloma virus, HIV, RNA-phages, Q13-phage (such as coat proteins), GA-phage, fr-phage, AP205 phage, and Ty (such as retrotransposon Ty protein p1). VLPs are discussed further in refs. 57-62. Virosomes are discussed further in, for example, ref. 63

[0160] E. Bacterial or Microbial Derivatives

[0161] Adjuvants suitable for use in the invention include bacterial or microbial derivatives such as non-toxic derivatives of enterobacterial lipopolysaccharide (LPS), Lipid A derivatives, immunostimulatory oligonucleotides and ADP-ribosylating toxins and detoxified derivatives thereof.

[0162] Non-toxic derivatives of LPS include monophosphoryl lipid A (MPL) and 3-O-deacylated MPL (3dMPL). 3dMPL is a mixture of 3 de-O-acylated monophosphoryl lipid A with 4, 5 or 6 acylated chains. A preferred “small particle” form of 3 De-O-acylated monophosphoryl lipid A is disclosed in ref. 64. Such “small particles” of 3dMPL are small enough to be sterile filtered through a 0.22 μm membrane [64]. Other non-toxic LPS derivatives include monophosphoryl lipid A mimics, such as aminoalkyl glucosaminide phosphate derivatives e.g. RC-529 [65,66].

[0163] Lipid A derivatives include derivatives of lipid A from Escherichia coli such as OM-174. OM-174 is described for example in refs. 67 & 68.

[0164] Immunostimulatory oligonucleotides suitable for use as adjuvants in the invention include nucleotide sequences containing a CpG motif (a dinucleotide sequence containing an unmethylated cytosine linked by a phosphate bond to a guanosine). Double-stranded RNAs and oligonucleotides containing palindromic or poly(dG) sequences have also been shown to be immunostimulatory.

[0165] The CpG's can include nucleotide modifications/analogs such as phosphorothioate modifications and can be double-stranded or single-stranded. References 69, 70 and 71 disclose possible analog substitutions e.g. replacement of guanosine with 2′-deoxy-7-deazaguanosine. The adjuvant effect of CpG oligonucleotides is further discussed in refs. 72-77.

[0166] The CpG sequence may be directed to TLR9, such as the motif GTCGTT or TTCGTT [78]. The CpG sequence may be specific for inducing a Th1 immune response, such as a CpG-A ODN, or it may be more specific for inducing a B cell response, such a CpG-B ODN. CpG-A and CpG-B ODNs are discussed in refs. 79-81. Preferably, the CpG is a CpG-A ODN.

[0167] Preferably, the CpG oligonucleotide is constructed so that the 5′ end is accessible for receptor recognition. Optionally, two CpG oligonucleotide sequences may be attached at their 3′ ends to form “immunomers”. See, for example, refs. 78 & 82-84.

[0168] A useful CpG adjuvant is CpG7909, also known as ProMune™ (Coley Pharmaceutical Group, Inc.). Another is CpG1826. As an alternative, or in addition, to using CpG sequences, TpG sequences can be used [85], and these oligonucleotides may be free from unmethylated CpG motifs. The immunostimulatory oligonucleotide may be pyrimidine-rich. For example, it may comprise more than one consecutive thymidine nucleotide (e.g. TTTT, as disclosed in ref. 85), and/or it may have a nucleotide composition with >25% thymidine (e.g. >35%, >40%, >50%, >60%, >80%, etc.). For example, it may comprise more than one consecutive cytosine nucleotide (e.g. CCCC, as disclosed in ref. 85), and/or it may have a nucleotide composition with >25% cytosine (e.g. >35%, >40%, >50%, >60%, >80%, etc.). These oligonucleotides may be free from unmethylated CpG motifs. Immunostimulatory oligonucleotides will typically comprise at least 20 nucleotides. They may comprise fewer than 100 nucleotides.

[0169] A particularly useful adjuvant based around immunostimulatory oligonucleotides is known as IC-31™ [86]. Thus an adjuvant used with the invention may comprise a mixture of (i) an oligonucleotide (e.g. between 15-40 nucleotides) including at least one (and preferably multiple) CpI motifs (i.e. a cytosine linked to an inosine to form a dinucleotide), and (ii) a polycationic polymer, such as an oligopeptide (e.g. between 5-20 amino acids) including at least one (and preferably multiple) Lys-Arg-Lys tripeptide sequence(s). The oligonucleotide may be a deoxynucleotide comprising 26-mer sequence 5′-(IC)₁₃-3′ (SEQ ID NO: 110). The polycationic polymer may be a peptide comprising 11-mer amino acid sequence KLKLLLLLKLK (SEQ ID NO: 111).

[0170] Bacterial ADP-ribosylating toxins and detoxified derivatives thereof may be used as adjuvants in the invention. Preferably, the protein is derived from E. coli (E. coli heat labile enterotoxin “LT”), cholera (“CT”), or pertussis (“PT”). The use of detoxified ADP-ribosylating toxins as mucosal adjuvants is described in ref. 87 and as parenteral adjuvants in ref. 88. The toxin or toxoid is preferably in the form of a holotoxin, comprising both A and B subunits. Preferably, the A subunit contains a detoxifying mutation; preferably the B subunit is not mutated. Preferably, the adjuvant is a detoxified LT mutant such as LT-K63, LT-R72, and LT-G192. The use of ADP-ribosylating toxins and detoxified derivatives thereof, particularly LT-K63 and LT-R72, as adjuvants can be found in refs. 89-96. A useful CT mutant is or CT-E29H [97]. Numerical reference for amino acid substitutions is preferably based on the alignments of the A and B subunits of ADP-ribosylating toxins set forth in ref. 98, specifically incorporated herein by reference in its entirety solely for the purpose of the alignment and amino acid numbering therein.

[0171] F. Human Immunomodulators

[0172] Human immunomodulators suitable for use as adjuvants in the invention include cytokines, such as interleukins (e.g. IL-1, IL-2, IL-4, IL-5, IL-6, IL-7, IL-12 [99], etc.) [100], interferons (e.g. interferon-γ), macrophage colony stimulating factor, and tumor necrosis factor. A preferred immunomodulator is IL-12.

[0173] G. Bioadhesives and Mucoadhesives

[0174] Bioadhesives and mucoadhesives may also be used as adjuvants in the invention. Suitable bioadhesives include esterified hyaluronic acid microspheres [101] or mucoadhesives such as cross-linked derivatives of poly(acrylic acid), polyvinyl alcohol, polyvinyl pyrollidone, polysaccharides and carboxymethylcellulose. Chitosan and derivatives thereof may also be used as adjuvants in the invention [102].

[0175] H. Microparticles

[0176] Microparticles may also be used as adjuvants in the invention. Microparticles (i.e. a particle of ˜100 nm to ˜150 μm in diameter, more preferably ˜200 nm to ˜30 μm in diameter, and most preferably ˜500 nm to ˜10 μm in diameter) formed from materials that are biodegradable and non-toxic (e.g. a poly(α-hydroxy acid), a polyhydroxybutyric acid, a polyorthoester, a polyanhydride, a polycaprolactone, etc.), with poly(lactide-co-glycolide) are preferred, optionally treated to have a negatively-charged surface (e.g. with SDS) or a positively-charged surface (e.g. with a cationic detergent, such as CTAB).

[0177] I. Liposomes (Chapters 13 & 14 of Ref. 30)

[0178] Examples of liposome formulations suitable for use as adjuvants are described in refs. 103-105.

[0179] J. Polyoxyethylene Ether and Polyoxyethylene Ester Formulations

[0180] Adjuvants suitable for use in the invention include polyoxyethylene ethers and polyoxyethylene esters [106]. Such formulations further include polyoxyethylene sorbitan ester surfactants in combination with an octoxynol [107] as well as polyoxyethylene alkyl ethers or ester surfactants in combination with at least one additional non-ionic surfactant such as an octoxynol [108]. Preferred polyoxyethylene ethers are selected from the following group: polyoxyethylene-9-lauryl ether (laureth 9), polyoxyethylene-9-steoryl ether, polyoxytheylene-8-steoryl ether, polyoxyethylene-4-lauryl ether, polyoxyethylene-35-lauryl ether, and polyoxyethylene-23-lauryl ether.

[0181] K. Phosphazenes

[0182] A phosphazene, such as poly[di(carboxylatophenoxy)phosphazene] (“PCPP”) as described, for example, in references 109 and 110, may be used.

[0183] L. Muramyl Peptides

[0184] Examples of muramyl peptides suitable for use as adjuvants in the invention include N-acetyl-muramyl-L-threonyl-D-isoglutamine (thr-MDP), N-acetyl-normuramyl-L-alanyl-D-isoglutamine (nor-MDP), and N-acetylmuramyl-L-alanyl-D-isoglutaminyl-L-alanine-2-(1′-2′-dipalmitoyl-sn-glycero-3-hydroxyphosphoryloxy)-ethylamine MTP-PE).

[0185] M. Imidazoquinolone Compounds.

[0186] Examples of imidazoquinolone compounds suitable for use adjuvants in the invention include Imiquimod (“R-837”) [111,112], Resiquimod (“R-848”) [113], and their analogs; and salts thereof (e.g. the hydrochloride salts). Further details about immunostimulatory imidazoquinolines can be found in references 114 to 118.

[0187] N. Substituted Ureas

[0188] Substituted ureas useful as adjuvants include compounds of formula I, II or III, or salts thereof:

[chemical structure]

as defined in reference 119, such as ‘ER 803058’, ‘ER 803732’, ‘ER 804053’, ER 804058′, ‘ER 804059’, ‘ER 804442’, ‘ER 804680’, ‘ER 804764’, ER 803022 or ‘ER 804057’ e.g.:

[chemical structure]

[0189] O. Further Adjuvants

[0190] Further adjuvants that may be used with the invention include:
[0191] An aminoalkyl glucosaminide phosphate derivative, such as RC-529 [120,121].
[0192] A thiosemicarbazone compound, such as those disclosed in reference 122. Methods of formulating, manufacturing, and screening for active compounds are also described in reference 122. The thiosemicarbazones are particularly effective in the stimulation of human peripheral blood mononuclear cells for the production of cytokines, such as TNF-α.
[0193] A tryptanthrin compound, such as those disclosed in reference 123. Methods of formulating, manufacturing, and screening for active compounds are also described in reference 123. The thiosemicarbazones are particularly effective in the stimulation of human peripheral blood mononuclear cells for the production of cytokines, such as TNF-α.
[0194] A nucleoside analog, such as: (a) Isatorabine (ANA-245; 7-thia-8-oxoguanosine):

[chemical structure]

and prodrugs thereof; (b) ANA975; (c) ANA-025-1; (d) ANA380; (e) the compounds disclosed in references 124 to 126Loxoribine (7-allyl-8-oxoguanosine) [127].
[0195] Compounds disclosed in reference 128, including: Acylpiperazine compounds, Indoledione compounds, Tetrahydraisoquinoline (THIQ) compounds, Benzocyclodione compounds, Aminoazavinyl compounds, Aminobenzimidazole quinolinone (ABIQ) compounds [129,130], Hydrapthalamide compounds, Benzophenone compounds, Isoxazole compounds, Sterol compounds, Quinazilinone compounds, Pyrrole compounds [131], Anthraquinone compounds, Quinoxaline compounds, Triazine compounds, Pyrazalopyrimidine compounds, and Benzazole compounds [132].
[0196] Compounds containing lipids linked to a phosphate-containing acyclic backbone, such as the TLR4 antagonist E5564 [133,134]:
[0197] A polyoxidonium polymer [135,136] or other N-oxidized polyethylene-piperazine derivative.
[0198] Methyl inosine 5′-monophosphate (“MIMP”) [137].
[0199] A polyhydroxlated pyrrolizidine compound [138], such as one having formula:

[chemical structure]

[0200] where R is selected from the group comprising hydrogen, straight or branched, unsubstituted or substituted, saturated or unsaturated acyl, alkyl (e.g. cycloalkyl), alkenyl, alkynyl and aryl groups, or a pharmaceutically acceptable salt or derivative thereof. Examples include, but are not limited to: casuarine, casuarine-6-α-D-glucopyranose, 3-epi-casuarine, 7-epi-casuarine, 3,7-diepi-casuarine, etc.
[0201] A CD1d ligand, such as an α-glycosylceramide [139-146] (e.g. α-galactosylceramide), phytosphingosine-containing α-glycosylceramides, OCH, KRN7000 [(2S,3S,4R)-1-O-(α-D-galactopyranosyl)-2-(N-hexacosanoylamino)-1,3,4-octadecanetriol], CRONY-101, 3″-O-sulfo-galactosylceramide, etc.
[0202] A gamma inulin [147] or derivative thereof, such as algammulin.

[chemical structure]

[0203] Adjuvant Combinations

[0204] The invention may also comprise combinations of aspects of one or more of the adjuvants identified above. For example, the following adjuvant compositions may be used in the invention: (1) a saponin and an oil-in-water emulsion [148]; (2) a saponin (e.g. QS21)+a non-toxic LPS derivative (e.g. 3dMPL) [149]; (3) a saponin (e.g. QS21)+a non-toxic LPS derivative (e.g. 3dMPL)+a cholesterol; (4) a saponin (e.g. QS21)+3dMPL+IL-12 (optionally+a sterol) [150]; (5) combinations of 3dMPL with, for example, QS21 and/or oil-in-water emulsions [151]; (6) SAF, containing 10% squalane, 0.4% Tween 80™, 5% pluronic-block polymer L121, and thr-MDP, either microfluidized into a submicron emulsion or vortexed to generate a larger particle size emulsion. (7) Ribi™ adjuvant system (RAS), (Ribi Immunochem) containing 2% squalene, 0.2% Tween 80, and one or more bacterial cell wall components from the group consisting of monophosphorylipid A (MPL), trehalose dimycolate (TDM), and cell wall skeleton (CWS), preferably MPL+CWS (Detox™); and (8) one or more mineral salts (such as an aluminum salt)+a non-toxic derivative of LPS (such as 3dMPL).

[0205] Other substances that act as immunostimulating agents are disclosed in chapter 7 of ref. 30.

[0206] The use of an aluminium hydroxide and/or aluminium phosphate adjuvant is particularly preferred, and antigens are generally adsorbed to these salts. Calcium phosphate is another preferred adjuvant. Other preferred adjuvant combinations include combinations of Th1 and Th2 adjuvants such as CpG & alum or resiquimod & alum. A combination of aluminium phosphate and 3dMPL may be used.

[0207] The compositions of the invention may elicit both a cell mediated immune response as well as a humoral immune response. This immune response will preferably induce long lasting (e.g. neutralising) antibodies and a cell mediated immunity that can quickly respond upon exposure to pnuemococcus.

[0208] Two types of T cells, CD4 and CD8 cells, are generally thought necessary to initiate and/or enhance cell mediated immunity and humoral immunity. CD8 T cells can express a CD8 co-receptor and are commonly referred to as Cytotoxic T lymphocytes (CTLs). CD8 T cells are able to recognized or interact with antigens displayed on MHC Class I molecules.

[0209] CD4 T cells can express a CD4 co-receptor and are commonly referred to as T helper cells. CD4 T cells are able to recognize antigenic peptides bound to MHC class II molecules. Upon interaction with a MHC class II molecule, the CD4 cells can secrete factors such as cytokines. These secreted cytokines can activate B cells, cytotoxic T cells, macrophages, and other cells that participate in an immune response. Helper T cells or CD4+ cells can be further divided into two functionally distinct subsets: TH1 phenotype and TH2 phenotypes which differ in their cytokine and effector function.

[0210] Activated TH1 cells enhance cellular immunity (including an increase in antigen-specific CTL production) and are therefore of particular value in responding to intracellular infections. Activated TH1 cells may secrete one or more of IL-2, IFN-γ, and TNF-β. A TH1 immune response may result in local inflammatory reactions by activating macrophages, NK (natural killer) cells, and CD8 cytotoxic T cells (CTLs). A TH1 immune response may also act to expand the immune response by stimulating growth of B and T cells with IL-12. TH1 stimulated B cells may secrete IgG2a.

[0211] Activated TH2 cells enhance antibody production and are therefore of value in responding to extracellular infections. Activated TH2 cells may secrete one or more of IL-4, IL-5, IL-6, and IL-10. A TH2 immune response may result in the production of IgG1, IgE, IgA and memory B cells for future protection.

[0212] An enhanced immune response may include one or more of an enhanced TH 1 immune response and a TH2 immune response.

[0213] A TH1 immune response may include one or more of an increase in CTLs, an increase in one or more of the cytokines associated with a TH1 immune response (such as IL-2, IFN-γ, and TNF-β), an increase in activated macrophages, an increase in NK activity, or an increase in the production of IgG2a. Preferably, the enhanced TH1 immune response will include an increase in IgG2a production.

[0214] A TH1 immune response may be elicited using a TH1 adjuvant. A TH1 adjuvant will generally elicit increased levels of IgG2a production relative to immunization of the antigen without adjuvant. TH1 adjuvants suitable for use in the invention may include for example saponin formulations, virosomes and virus like particles, non-toxic derivatives of enterobacterial lipopolysaccharide (LPS), immunostimulatory oligonucleotides. Immunostimulatory oligonucleotides, such as oligonucleotides containing a CpG motif, are preferred TH 1 adjuvants for use in the invention.

[0215] A TH2 immune response may include one or more of an increase in one or more of the cytokines associated with a TH2 immune response (such as IL-4, IL-5, IL-6 and IL-10), or an increase in the production of IgG1, IgE, IgA and memory B cells. Preferably, the enhanced TH2 immune response will include an increase in IgG1 production.

[0216] A TH2 immune response may be elicited using a TH2 adjuvant. A TH2 adjuvant will generally elicit increased levels of IgG1 production relative to immunization of the antigen without adjuvant. TH2 adjuvants suitable for use in the invention include, for example, mineral containing compositions, oil-emulsions, and ADP-ribosylating toxins and detoxified derivatives thereof. Mineral containing compositions, such as aluminium salts are preferred TH2 adjuvants for use in the invention.

[0217] Preferably, the invention includes a composition comprising a combination of a TH1 adjuvant and a TH2 adjuvant. Preferably, such a composition elicits an enhanced TH1 and an enhanced TH2 response, i.e., an increase in the production of both IgG1 and IgG2a production relative to immunization without an adjuvant. Still more preferably, the composition comprising a combination of a TH1 and a TH2 adjuvant elicits an increased TH1 and/or an increased TH2 immune response relative to immunization with a single adjuvant (i.e., relative to immunization with a TH1 adjuvant alone or immunization with a TH2 adjuvant alone).

[0218] The immune response may be one or both of a TH1 immune response and a TH2 response. Preferably, immune response provides for one or both of an enhanced TH1 response and an enhanced TH2 response.

[0219] The enhanced immune response may be one or both of a systemic and a mucosal immune response. Preferably, the immune response provides for one or both of an enhanced systemic and an enhanced mucosal immune response. Preferably the mucosal immune response is a TH2 immune response. Preferably, the mucosal immune response includes an increase in the production of IgA.

[0220] E. coli can cause disease at a number of anatomical locations [4] and so the compositions of the invention may be prepared in various forms. For example, the compositions may be prepared as injectables, either as liquid solutions or suspensions. Solid forms suitable for solution in, or suspension in, liquid vehicles prior to injection can also be prepared (e.g. a lyophilised composition or a spray-freeze dried composition). The composition may be prepared for topical administration e.g. as an ointment, cream or powder. The composition may be prepared for oral administration e.g. as a tablet or capsule, as a spray, or as a syrup (optionally flavoured). The composition may be prepared for pulmonary administration e.g. as an inhaler, using a fine powder or a spray. The composition may be prepared as a suppository or pessary. The composition may be prepared for nasal, aural or ocular administration e.g. as drops. The composition may be in kit form, designed such that a combined composition is reconstituted just prior to administration to a patient. Such kits may comprise one or more antigens in liquid form and one or more lyophilised antigens.

[0221] Where a composition is to be prepared extemporaneously prior to use (e.g. where a component is presented in lyophilised form) and is presented as a kit, the kit may comprise two vials, or it may comprise one ready-filled syringe and one vial, with the contents of the syringe being used to reactivate the contents of the vial prior to injection.

[0222] Immunogenic compositions used as vaccines comprise an immunologically effective amount of antigen(s), as well as any other components, as needed. By ‘immunologically effective amount’, it is meant that the administration of that amount to an individual, either in a single dose or as part of a series, is effective for treatment or prevention. This amount varies depending upon the health and physical condition of the individual to be treated, age, the taxonomic group of individual to be treated (e.g. non-human primate, primate, etc.), the capacity of the individual's immune system to synthesise antibodies, the degree of protection desired, the formulation of the vaccine, the treating doctor's assessment of the medical situation, and other relevant factors. It is expected that the amount will fall in a relatively broad range that can be determined through routine trials.

### Methods of Treatment, and Administration of the Vaccine

[0223] The invention also provides a method for raising an immune response in a mammal comprising the step of administering an effective amount of a composition of the invention. The immune response is preferably protective and preferably involves antibodies and/or cell-mediated immunity. The method may raise a booster response.

[0224] The invention also provides a polypeptide of the invention for use as a medicament e.g. for use in raising an immune response in a mammal.

[0225] The invention also provides the use of a polypeptide of the invention in the manufacture of a medicament for raising an immune response in a mammal.

[0226] The invention also provides a delivery device pre-filled with an immunogenic composition of the invention.

[0227] By raising an immune response in the mammal by these uses and methods, the mammal can be protected against E. coli infection, including ExPEC and non-ExPEC strains. The invention is particularly useful for providing broad protection against pathogenic E. coli, including intestinal pathotypes such as EPEC, EAEC, EIEC, ETEC and DAEC pathotypes. Thus the mammal may be protected against diseases including, but not limited to peritonitis, pyelonephritis, cystitis, endocarditis, prostatitis, urinary tract infections (UTIs), meningitis (particularly neonatal meningitis), sepsis (or SIRS), dehydration, pneumonia, diarrhea (infantile, travellers', acute, persistent, etc.), bacillary dysentery, hemolytic uremic syndrome (HUS), pericarditis, bacteriuria, etc.

[0228] SEQ ID NO: 21, 30, 35, 40, 49, 54, 59, 68, and 73 and their other detoxified variants are particularly useful for immunising against the EAEC pathotype, and thus for preventing diarrhea (both acute and chronic).

[0229] SEQ ID NO: 22, 28, 36, 41, 47, 55, 56, 60, 66, 74, and 75 and their other detoxified variants are particularly useful for immunising against the UPEC pathotype, and thus for preventing UTIs including, but not limited to, pyelonephritis, cystitis (both acute and recurrent), peritonitis, catheter-associated UTIs, prostatisis, and bacteriuria (including asymptomatic bacteriuria).

[0230] SEQ ID NO: 23, 42, and 61 and their other detoxified variants are particularly useful for immunising against the EIEC pathotype, and thus for preventing dysentery (in particular bacillary dysentery) and HUS (e.g. in children).

[0231] SEQ ID NO: 24, 27, 29, 43, 46, 48, 62, 65, and 67 and their other detoxified variants are particularly useful for immunising against the ETEC pathotype, and thus for preventing diarrhea (including travellers' and infant diarrhea).

[0232] SEQ ID NO: 25, 26, 33, 34, 45, 53, 63, 64, and 72 and their other detoxified variants are particularly useful for immunising against the EAEC pathotype, and thus for preventing diarrhea (both acute and chronic).

[0233] SEQ ID NO: 79, 85, 93, and 94 and their other detoxified variants are particularly useful for immunising against the UPEC pathotype, and thus for preventing UTIs including, but not limited to, pyelonephritis, cystitis (both acute and recurrent), peritonitis, catheter-associated UTIs, prostatisis, and bacteriuria (including asymptomatic bacteriuria).

[0234] SEQ ID NO: 80 and their other detoxified variants are particularly useful for immunising against the EIEC pathotype, and thus for preventing dysentery (in particular bacillary dysentery) and HUS (e.g. in children).

[0235] SEQ ID NO: 81, 84, and 86 and their other detoxified variants are particularly useful for immunising against the ETEC pathotype, and thus for preventing diarrhea (including travellers' and infant diarrhea).

[0236] SEQ ID NOs: 82, 83, and 91 and their other detoxified variants are particularly useful for immunising against the EPEC pathotype, and thus for preventing diarrhea (including infantile diarrhea).

[0237] SEQ ID NO: 21, 30, 35, 40, 49, 54, 59, 68, and 73 and their other variants are particularly useful for immunising against the EAEC pathotype, and thus for preventing diarrhea (both acute and chronic).

[0238] SEQ ID NO: 22, 28, 36, 41, 47, 55, 56, 60, 66, 74, and 75 and their other variants are particularly useful for immunising against the UPEC pathotype, and thus for preventing UTIs including, but not limited to, pyelonephritis, cystitis (both acute and recurrent), peritonitis, catheter-associated UTIs, prostatisis, and bacteriuria (including asymptomatic bacteriuria).

[0239] SEQ ID NO: 23, 42, and 61 and their other variants are particularly useful for immunising against the EIEC pathotype, and thus for preventing dysentery (in particular bacillary dysentery) and HUS (e.g. in children).

[0240] SEQ ID NO: 24, 27, 29, 43, 46, 48, 62, 65, and 67 and their other variants are particularly useful for immunising against the ETEC pathotype, and thus for preventing diarrhea (including travellers' and infant diarrhea).

[0241] SEQ ID NO: 25, 26, 33, 34, 45, 53, 63, 64, and 72 and their other variants are particularly useful for immunising against the EAEC pathotype, and thus for preventing diarrhea (both acute and chronic).

[0242] SEQ ID NO: 79, 85, 93, and 94 and their other are particularly useful for immunising against the UPEC pathotype, and thus for preventing UTIs including, but not limited to, pyelonephritis, cystitis (both acute and recurrent), peritonitis, catheter-associated UTIs, prostatisis, and bacteriuria (including asymptomatic bacteriuria).

[0243] SEQ ID NO: 80 and their other variants are particularly useful for immunising against the EIEC pathotype, and thus for preventing dysentery (in particular bacillary dysentery) and HUS (e.g. in children).

[0244] SEQ ID NO: 81, 84, and 86 and their other variants are particularly useful for immunising against the ETEC pathotype, and thus for preventing diarrhea (including travellers' and infant diarrhea).

[0245] SEQ ID NOs: 82, 83, and 91 and their other variants are particularly useful for immunising against the EPEC pathotype, and thus for preventing diarrhea (including infantile diarrhea).

[0246] The mammal is preferably a human, but may be e.g. a cow, a pig, a chicken, a cat or a dog, as E. coli disease is also problematic in these species [4]. Where the vaccine is for prophylactic use, the human is preferably a child (e.g. a toddler or infant) or a teenager; where the vaccine is for therapeutic use, the human is preferably a teenager or an adult. A vaccine intended for children may also be administered to adults e.g. to assess safety, dosage, immunogenicity, etc.

[0247] One way of checking efficacy of therapeutic treatment involves monitoring E. coli infection after administration of the compositions of the invention. One way of checking efficacy of prophylactic treatment involves monitoring immune responses, systemically (such as monitoring the level of IgG1 and IgG2a production) and/or mucosally (such as monitoring the level of IgA production), against the antigens in the compositions of the invention after administration of the composition. Typically, antigen-specific serum antibody responses are determined post-immunisation but pre-challenge whereas antigen-specific mucosal antibody responses are determined post-immunisation and post-challenge.

[0248] Another way of assessing the immunogenicity of the compositions of the present invention is to express the proteins recombinantly for screening patient sera or mucosal secretions by immunoblot and/or microarrays. A positive reaction between the protein and the patient sample indicates that the patient has mounted an immune response to the protein in question. This method may also be used to identify immunodominant antigens and/or epitopes within antigens.

[0249] The efficacy of vaccine compositions can also be determined in vivo by challenging animal models of E. coli infection, e.g., guinea pigs or mice, with the vaccine compositions. A murine model of ExPEC and lethal sepsis is described in reference 152. A cotton rat model is disclosed in ref. 153

[0250] Compositions of the invention will generally be administered directly to a patient. Direct delivery may be accomplished by parenteral injection (e.g. subcutaneously, intraperitoneally, intravenously, intramuscularly, or to the interstitial space of a tissue), or mucosally, such as by rectal, oral (e.g. tablet, spray), vaginal, topical, transdermal or transcutaneous, intranasal, ocular, aural, pulmonary or other mucosal administration. Novel direct delivery forms can also include transgenic expression of the polypeptides disclosed herein in foods, e.g., transgenic expression in a potato.

[0251] The invention may be used to elicit systemic and/or mucosal immunity, preferably to elicit an enhanced systemic and/or mucosal immunity.

[0252] Preferably the enhanced systemic and/or mucosal immunity is reflected in an enhanced TH1 and/or TH2 immune response. Preferably, the enhanced immune response includes an increase in the production of IgG1 and/or IgG2a and/or IgA.

[0253] Dosage can be by a single dose schedule or a multiple dose schedule. Multiple doses may be used in a primary immunisation schedule and/or in a booster immunisation schedule. In a multiple dose schedule the various doses may be given by the same or different routes e.g. a parenteral prime and mucosal boost, a mucosal prime and parenteral boost, etc. Multiple doses will typically be administered at least 1 week apart (e.g. about 2 weeks, about 3 weeks, about 4 weeks, about 6 weeks, about 8 weeks, about 10 weeks, about 12 weeks, about 16 weeks, etc.).

[0254] Vaccines of the invention may be used to treat both children and adults. Thus a human patient may be less than 1 year old, 1-5 years old, 5-15 years old, 15-55 years old, or at least 55 years old. Preferred patients for receiving the vaccines are the elderly (e.g. ≧50 years old, ≧60 years old, and preferably ≧65 years), the young (e.g. ≦5 years old), hospitalised patients, healthcare workers, armed service and military personnel, pregnant women, the chronically ill, or immunodeficient patients. The vaccines are not suitable solely for these groups, however, and may be used more generally in a population.

[0255] Vaccines of the invention are particularly useful for patients who are expecting a surgical operation, or other hospital in-patients. They are also useful in patients who will be catheterized. They are also useful in adolescent females (e.g. aged 11-18) and in patients with chronic urinary tract infections.

[0256] Vaccines of the invention may be administered to patients at substantially the same time as (e.g. during the same medical consultation or visit to a healthcare professional or vaccination centre) other vaccines e.g. at substantially the same time as a measles vaccine, a mumps vaccine, a rubella vaccine, a MMR vaccine, a varicella vaccine, a MMRV vaccine, a diphtheria vaccine, a tetanus vaccine, a pertussis vaccine, a DTP vaccine, a conjugated H. influenzae type b vaccine, an inactivated poliovirus vaccine, a hepatitis B virus vaccine, a meningococcal conjugate vaccine (such as a tetravalent A-C—W135-Y vaccine), a respiratory syncytial virus vaccine, etc.

### Nucleic Acid Immunisation

[0257] The immunogenic compositions described above include polypeptide antigens. In all cases, however, the polypeptide antigens can be replaced by nucleic acids (typically DNA) encoding those polypeptides, to give compositions, methods and uses based on nucleic acid immunisation. Nucleic acid immunisation is now a developed field (e.g. see references 154 to 161 etc.).

[0258] The nucleic acid encoding the immunogen is expressed in vivo after delivery to a patient and the expressed immunogen then stimulates the immune system. The active ingredient will typically take the form of a nucleic acid vector comprising: (i) a promoter; (ii) a sequence encoding the immunogen, operably linked to the promoter; and optionally (iii) a selectable marker. Preferred vectors may further comprise (iv) an origin of replication; and (v) a transcription terminator downstream of and operably linked to (ii). In general, (i) & (v) will be eukaryotic and (iii) & (iv) will be prokaryotic.

[0259] Preferred promoters are viral promoters e.g. from cytomegalovirus (CMV). The vector may also include transcriptional regulatory sequences (e.g. enhancers) in addition to the promoter and which interact functionally with the promoter. Preferred vectors include the immediate-early CMV enhancer/promoter, and more preferred vectors also include CMV intron A. The promoter is operably linked to a downstream sequence encoding an immunogen, such that expression of the immunogen-encoding sequence is under the promoter's control.

[0260] Where a marker is used, it preferably functions in a microbial host (e.g. in a prokaryote, in a bacteria, in a yeast). The marker is preferably a prokaryotic selectable marker (e.g. transcribed under the control of a prokaryotic promoter). For convenience, typical markers are antibiotic resistance genes.

[0261] The vector of the invention is preferably an autonomously replicating episomal or extrachromosomal vector, such as a plasmid.

[0262] The vector of the invention preferably comprises an origin of replication. It is preferred that the origin of replication is active in prokaryotes but not in eukaryotes.

[0263] Preferred vectors thus include a prokaryotic marker for selection of the vector, a prokaryotic origin of replication, but a eukaryotic promoter for driving transcription of the immunogen-encoding sequence. The vectors will therefore (a) be amplified and selected in prokaryotic hosts without polypeptide expression, but (b) be expressed in eukaryotic hosts without being amplified. This arrangement is ideal for nucleic acid immunization vectors.

[0264] The vector of the invention may comprise a eukaryotic transcriptional terminator sequence downstream of the coding sequence. This can enhance transcription levels. Where the coding sequence does not have its own, the vector of the invention preferably comprises a polyadenylation sequence. A preferred polyadenylation sequence is from bovine growth hormone.

[0265] The vector of the invention may comprise a multiple cloning site

[0266] In addition to sequences encoding the immunogen and a marker, the vector may comprise a second eukaryotic coding sequence. The vector may also comprise an IRES upstream of said second sequence in order to permit translation of a second eukaryotic polypeptide from the same transcript as the immunogen. Alternatively, the immunogen-coding sequence may be downstream of an IRES.

[0267] The vector of the invention may comprise unmethylated CpG motifs e.g. unmethylated DNA sequences which have in common a cytosine preceding a guanosine, flanked by two 5′ purines and two 3′ pyrimidines. In their unmethylated form these DNA motifs have been demonstrated to be potent stimulators of several types of immune cell.

[0268] Vectors may be delivered in a targeted way. Receptor-mediated DNA delivery techniques are described in, for example, references 162 to 167. Therapeutic compositions containing a nucleic acid are administered in a range of about 100 ng to about 200 mg of DNA for local administration in a gene therapy protocol. Concentration ranges of about 500 ng to about 50 mg, about 1 μg to about 2 mg, about 5 μg to about 500 μg, and about 20 μg to about 100 μg of DNA can also be used during a gene therapy protocol. Factors such as method of action (e.g. for enhancing or inhibiting levels of the encoded gene product) and efficacy of transformation and expression are considerations which will affect the dosage required for ultimate efficacy. Where greater expression is desired over a larger area of tissue, larger amounts of vector or the same amounts re-administered in a successive protocol of administrations, or several administrations to different adjacent or close tissue portions may be required to effect a positive therapeutic outcome. In all cases, routine experimentation in clinical trials will determine specific ranges for optimal therapeutic effect.

[0269] Vectors can be delivered using gene delivery vehicles. The gene delivery vehicle can be of viral or non-viral origin (see generally references 168 to 171).

[0270] Viral-based vectors for delivery of a desired nucleic acid and expression in a desired cell are well known in the art. Exemplary viral-based vehicles include, but are not limited to, recombinant retroviruses (e.g. references 172 to 182), alphavirus-based vectors (e.g. Sindbis virus vectors, Semliki forest virus (ATCC VR-67; ATCC VR-1247), Ross River virus (ATCC VR-373; ATCC VR-1246) and Venezuelan equine encephalitis virus (ATCC VR-923; ATCC VR-1250; ATCC VR 1249; ATCC VR-532); hybrids or chimeras of these viruses may also be used), poxvirus vectors (e.g. vaccinia, fowlpox, canarypox, modified vaccinia Ankara, etc.), adenovirus vectors, and adeno-associated virus (AAV) vectors (e.g. see refs. 183 to 188). Administration of DNA linked to killed adenovirus [189] can also be employed.

[0271] Non-viral delivery vehicles and methods can also be employed, including, but not limited to, polycationic condensed DNA linked or unlinked to killed adenovirus alone [e.g. 189], ligand-linked DNA [190], eukaryotic cell delivery vehicles cells [e.g. refs. 191 to 195] and nucleic charge neutralization or fusion with cell membranes. Naked DNA can also be employed. Exemplary naked DNA introduction methods are described in refs. 196 and 197. Liposomes (e.g. immunoliposomes) that can act as gene delivery vehicles are described in refs. 198 to 202. Additional approaches are described in references 203 & 204.

[0272] Further non-viral delivery suitable for use includes mechanical delivery systems such as the approach described in ref. 204. Moreover, the coding sequence and the product of expression of such can be delivered through deposition of photopolymerized hydrogel materials or use of ionizing radiation [e.g. refs. 205 & 206]. Other conventional methods for gene delivery that can be used for delivery of the coding sequence include, for example, use of hand-held gene transfer particle gun [207] or use of ionizing radiation for activating transferred genes [205 & 206].

[0273] Delivery DNA using PLG {poly(lactide-co-glycolide)} microparticles is a particularly preferred method e.g. by adsorption to the microparticles, which are optionally treated to have a negatively-charged surface (e.g. treated with SDS) or a positively-charged surface (e.g. treated with a cationic detergent, such as CTAB).

### General

[0274] The practice of the present invention will employ, unless otherwise indicated, conventional methods of chemistry, biochemistry, molecular biology, immunology and pharmacology, within the skill of the art. Such techniques are explained fully in the literature. See, e.g., references 208-215, etc.

[0275] The term “comprising” encompasses “including” as well as “consisting” e.g. a composition “comprising” X may consist exclusively of X or may include something additional e.g. X+Y.

[0276] The term “about” in relation to a numerical value x means, for example, x±10%.

[0277] “GI” numbering is used herein. A GI number, or “GenInfo Identifier”, is a series of digits assigned consecutively to each sequence record processed by NCBI when sequences are added to its databases. The GI number bears no resemblance to the accession number of the sequence record. When a sequence is updated (e.g. for correction, or to add more annotation or information) then it receives a new GI number. Thus the sequence associated with a given GI number is never changed.

[0278] References to a percentage sequence identity between two amino acid sequences means that, when aligned, that percentage of amino acids are the same in comparing the two sequences. This alignment and the percent homology or sequence identity can be determined using software programs known in the art, for example those described in section 7.7.18 of ref. 216. A preferred alignment is determined by the Smith-Waterman homology search algorithm using an affine gap search with a gap open penalty of 12 and a gap extension penalty of 2, BLOSUM matrix of 62. The Smith-Waterman homology search algorithm is disclosed in ref. 217.

[0279] One of skill in the art would understand that “isolated” means altered “by the hand of man” from its natural state, i.e., if it occurs in nature, it has been changed or removed from its original environment, or both. For example, a polynucleotide or a polypeptide naturally present in a living organism is not “isolated” when in such living organism, but the same polynucleotide or polypeptide separated from the coexisting materials of its natural state is “isolated,” as the term is used in this disclosure. Further, a polynucleotide or polypeptide that is introduced into an organism by transformation, genetic manipulation or by any other recombinant method would be understood to be “isolated” even if it is still present in said organism, which organism may be living or non-living, except where such transformation, genetic manipulation or other recombinant method produces an organism that is otherwise indistinguishable from the naturally occurring organism.

### BRIEF DESCRIPTION OF DRAWINGS

[0280] FIG. 1 shows a CLUSTALW alignment of SEQ ID NOs: 2 to 16. The N-terminal regions that may be removed to increase solubility while maintaining substantially the same immunogenicity are shown at the bottom of the alignment. The N-terminal region up to the gly-ser linker or gly-ser region is denoted with “G” and the proline-rich region is denoted with “P.”

[0281] FIG. 2 shows the amino acid identity between pairs of sequences.

[0282] FIG. 3 shows gel analysis of purified protein, with high MW bands visible in the absence of DTT.

[0283] FIG. 4 shows the Western Blot of pathogenic and non pathogenic E. coli strains using an anti-AcfD (orf3526) serum. Panel (A) is a Western Blot of the total cell lysate. Panel (B) is a Western Blot of the supernatant from the culture. The lanes in each of panel (A) and (B) from left to right are as follows: Lane M—marker proteins with the molecular weight in kDa of each marker protein shown along the left side of panel (A); 1—IHE3034; 2—CFT073; 3—536; 4—BL21; 5—MG 1655; 6—W3110; 7—NISSLE1917; 8—IHE3034ΔAcfD. As observed from the analysis, pathogenic strains (IHE3034, lane 1; 536, lane 3) express and secrete AcfD (orf3526) while non-pathogenic strains (MG1655, lane 5; W3110, lane 6; Nissle 1917, lane 7) express the protein but its secretion is defective. Strains CFT073 (lane 2) and IHE3034ΔAcfD (lane 8) are used as negative control, since they don't harbor the AcfD (orf3526) gene. BL21 strain (lane 4) is a lab strain used as positive control, since it expresses and secretes AcfD (orf3526).

[0284] FIG. 5 shows a comparison of solubility of the AcfD (orf3526) protein and various fragments of the protein. Panel (A) is an SDS-PAGE gradient gel (4-12% MOPS buffer) of samples at 37° C. comparing the pellet (left lane for each protein or fragment) to the supernatant (right lane for each protein or fragment. The lanes from left to right are: Molecular weight markers (191 kDa, 97 kDa and 64 kDa bands are labelled), control bacteria transformed with the pET expression vector with no insert, bacterial expression of 3526 (his tag, leader peptide removed), bacterial expression of L3526 (his tag, full length), bacterial expression of L3526-2 stop (full length with a stop codon before His tag), bacterial expression of ΔG3526 (his tag, removal of the N-terminus of AcfD (orf3526) to the flexible glycine-serine linker), and bacterial expression of ΔP3526 (his tag+removal of the N-terminus of AcfD (orf3526) through the proline rich region). Panel (B) is an SDS-PAGE gradient gel (4-12% MOPS buffer) of samples at 25° C. following the same order for the lanes as panel (A).

[0285] FIG. 6 shows a comparison of expression and purification of the AcfD (orf3526) protein and various fragments of the protein. Panel (A) is an SDS-PAGE gel (12% MOPS buffer) of samples at from bacteria expressing 3526 (his tag, leader peptide removed), cultured at 25° C. comparing fractions from various stages of the purification. The lanes from left to right are: M: Molecular weight markers (191 kDa, 97 kDa and 64 kDa bands are labelled), TOT: total bacterial lysate, INS: insoluble fraction of bacterial lysate, SM: soluble fraction of bacterial lysate, FT: flow through from Nickel column; E1, E2, and E3 three elutions with 500 mM imidazole buffer. Panel (B) is an SDS-PAGE gel (12% MOPS buffer) of samples at from bacteria expressing ΔG3526 (his tag, removal of the N-terminus of AcfD (orf3526) to the flexible glycine-serine linker) cultured at 25° C. comparing fractions from various stages of the purification. The lanes from left to right are: M: Molecular weight markers (191 kDa, 97 kDa and 64 kDa bands are labelled), TOT: total bacterial lysate, INS: insoluble fraction of bacterial lysate, SM: soluble fraction of bacterial lysate, FT: flow through from Nickel column; E1, E2, and E3 three elutions with 500 mM imidazole buffer. Panel (C) is an SDS-PAGE gel (12% MOPS buffer) of samples from bacteria expressing ΔP3526 (his tag, removal of the N-terminus of AcfD (orf3526) through the proline rich region), cultured at 25° C. comparing fractions from various stages of the purification. The lanes from left to right are: M: Molecular weight markers (191 kDa, 97 kDa and 64 kDa bands are labelled), TOT: total bacterial lysate, INS: insoluble fraction of bacterial lysate, SM: soluble fraction of bacterial lysate, FT: flow through from Nickel column; E1, E2, and E3 three elutions with 500 mM imidazole buffer.

[0286] FIG. 7 shows the amino acid identity between additional pairs of sequences. Sixteen Enterohemorrhagic E. coli (EHEC) were not found to have AcfD (orf3526) gene (not shown). The sequences (where represented) from left to right or top to bottom are as follows: 10 non-pathogenic or commensal strains (1: a commensal E. coli strain, 2: DH10B strain, 3: MG1655 strain, 4: W3110 strain (SEQ ID NO:14); 5: HS strain (SEQ ID NO:13); 9: another commensal E. coli strain; and 10: yet another commensal E. coli strain); three NMEC strains (1: NMEC strain RS218; 2: NMEC strain IHE3034 (SEQ ID NO:2); and 3: NMEC strain S88 (SEQ ID NO:141)); one APEC strain (1: APEC O1 strain); six UPEC strains (2: UPEC strain 536 (SEQ ID NO:4); 3: UTI89; 4: UPEC strain F11 (SEQ ID NO:10); 5: UPEC strain IA139 (SEQ ID NO:133); and 6: UPEC strain UMN026 (SEQ ID NO:137)); three EAEC strains (1: EAEC strain 101-1 (SEQ ID NO:3); 2: EAEC strain O42 (SEQ ID NO:12; and 3: EAEC strain 55989 (SEQ ID NO:129)); one EIEC strain (1: EIEC strain 53638 (SEQ ID NO:5)); four EPEC strains (2: EPEC strain E22 (SEQ ID NO: 8)); 3: EPEC strain E2348/69 (SEQ ID NO:16); and 4: EPEC strain E110019 (SEQ ID NO:7)); three ETEC strains (1: ETEC strain B7A (SEQ ID NO:6); 2: ETEC strain E24377A (SEQ ID NO:9); and 3: ETEC strain H10407 (SEQ ID NO:11)); and one antibiotic resistant strain (1: antibiotic-resistant strain SECEC (SEQ ID NO:15)).

[0287] FIG. 8 shows the sequence motifs identified in AcfD (orf3526) including from left to right: a lipidation motif; a proline rich region, a WxxxE motif, a zinc binding motif, and an RGD domain.

[0288] FIG. 9 shows the family relationships of the various zinc metalloproteases. The zincins are highlighted with a grey box as the zincin motif is the motif found in AcfD (orf3526) (See FIG. 8).

[0289] FIG. 10 shows an SDS-PAGE (4-12% gradient, Bis-Tris) of orf3526C expression. The lanes are labelled across the top as follows: (1) Total cell lysate—no IPTG, 6 hours at 25° C.; (2) Total cell lysate—1 mM IPTG, 3 hours at 25° C.; (3) Total cell lysate—1 mM IPTG, 6 hours at 25° C.; (M) Markers (sizes are indicated in kDa along the left side of the gel); (4) soluble fraction after sonication—1 mM IPTG, 3 hours at 25° C.; and (5) soluble fraction after sonication—1 mM IPTG, 6 hours at 25° C.

### BRIEF DESCRIPTION OF SEQUENCE LISTING

| SEQ ID | Description |
|---|---|
| | SEQ ID NOs: 1-19 = full length amino acid sequences |
| 1 | Amino acid sequence from NMEC strain IHE3034 |
| 2 | Amino acid sequence from EAEC strain 101-1 (GI: 83587587) |
| 3 | Amino acid sequence from UPEC strain 536 (GI: 110643204) |
| 4 | Amino acid sequence from EIEC strain 53638 (GI: 75515237) |
| 5 | Amino acid sequence from ETEC strain B7A (GI: 75227618) |
| 6 | Amino acid sequence from EPEC strain E110019 (GI: 75239450) |
| 7 | Amino acid sequence from EPEC strain E22 (GI: 75259912) |
| 8 | Amino acid sequence from ETEC strain E24377A (GI: 157156747) |
| 9 | Amino acid sequence from UPEC strain F11 (GI: 75241179) |
| 10 | Amino acid sequence from ETEC strain H10407 |
| 11 | Amino acid sequence from EAEC strain O42 |
| 12 | Amino acid sequence from commensal strain HS (GI: 157162442) |
| 13 | Amino acid sequence from commensal strain W3110 (GI: 89109748) |
| 14 | Amino acid sequence from antibiotic-resistant strain SECEC |
| 15 | Amino acid sequence from EPEC strain E2348/69 |
| 16 | Amino acid sequence from EAEC strain 55989 |
| 17 | Amino acid sequence from UPEC strain IAI39 |
| 18 | Amino acid sequence from UPEC strain UMN026 |
| 19 | Amino acid sequence from NMEC strain S88 |
| | SEQ ID NOs: 20-38 = C-terminal deletion amino acid sequences |
| 20 | Amino acid sequence from NMEC strain IHE3034 with C-terminal deletion |
| 21 | Amino acid sequence from EAEC strain 101-1 (GI: 83587587) with C-terminal |
| | deletion |
| 22 | Amino acid sequence from UPEC strain 536 (GI: 110643204) with C-terminal |
| | deletion |
| 23 | Amino acid sequence from EIEC strain 53638 (GI: 75515237) with C-terminal |
| | deletion |
| 24 | Amino acid sequence from ETEC strain B7A (GI: 75227618) with C-terminal |
| | deletion |
| 25 | Amino acid sequence from EPEC strain E110019 (GI: 75239450) with C- |
| | terminal deletion |
| 26 | Amino acid sequence from EPEC strain E22 (GI: 75259912) with C-terminal |
| | deletion |
| 27 | Amino acid sequence from ETEC strain E24377A (GI: 157156747) with C- |
| | terminal deletion |
| 28 | Amino acid sequence from UPEC strain F11 (GI: 75241179) with C-terminal |
| | deletion |
| 29 | Amino acid sequence from ETEC strain H10407 with C-terminal deletion |
| 30 | Amino acid sequence from EAEC strain O42 with C-terminal deletion |
| 31 | Amino acid sequence from commensal strain HS (GI: 157162442) with C- |
| | terminal deletion |
| 32 | Amino acid sequence from commensal strain W3110 (GI: 89109748) with C- |
| | terminal deletion |
| 33 | Amino acid sequence from antibiotic-resistant strain SECEC with C-terminal |
| | deletion |
| 34 | Amino acid sequence from EPEC strain E2348/69 with C-terminal deletion |
| 35 | Amino acid sequence from EAEC strain 55989 with C-terminal deletion |
| 36 | Amino acid sequence from UPEC strain IAI39 with C-terminal deletion |
| 37 | Amino acid sequence from UPEC strain UMN026 with C-terminal deletion |
| 38 | Amino acid sequence from NMEC strain S88 with C-terminal deletion |
| | SEQ ID NOs: 39-57 = N-terminal deletion amino acid sequences |
| 39 | Amino acid sequence from NMEC strain IHE3034 with N-terminal deletion |
| 40 | Amino acid sequence from EAEC strain 101-1 (GI: 83587587) with N-terminal |
| | deletion |
| 41 | Amino acid sequence from UPEC strain 536 (GI: 110643204) with N-terminal |
| | deletion |
| 42 | Amino acid sequence from EIEC strain 53638 (GI: 75515237) with N-terminal |
| | deletion |
| 43 | Amino acid sequence from ETEC strain B7A (GI: 75227618) with N-terminal |
| | deletion |
| 44 | Amino acid sequence from EPEC strain E110019 (GI: 75239450) with N- |
| | terminal deletion |
| 45 | Amino acid sequence from EPEC strain E22 (GI: 75259912) with N-terminal |
| | deletion |
| 46 | Amino acid sequence from ETEC strain E24377A (GI: 157156747) with N- |
| | terminal deletion |
| 47 | Amino acid sequence from UPEC strain F11 (GI: 75241179) with N-terminal |
| | deletion |
| 48 | Amino acid sequence from ETEC strain H10407 with N-terminal deletion |
| 49 | Amino acid sequence from EAEC strain O42 with N-terminal deletion |
| 50 | Amino acid sequence from commensal strain HS (GI: 157162442) with N- |
| | terminal deletion |
| 51 | Amino acid sequence from commensal strain W3110 (GI: 89109748) with N- |
| | terminal deletion |
| 52 | Amino acid sequence from antibiotic-resistant strain SECEC with N-terminal |
| | deletion |
| 53 | Amino acid sequence from EPEC strain E2348/69 with N-terminal deletion |
| 54 | Amino acid sequence from EAEC strain 55989 with N-terminal deletion |
| 55 | Amino acid sequence from UPEC strain IAI39 with N-terminal deletion |
| 56 | Amino acid sequence from UPEC strain UMN026 with N-terminal deletion |
| 57 | Amino acid sequence from NMEC strain S88 with N-terminal deletion |
| | SEQ ID NOs: 58-76 = E1305A point mutation amino acid sequences |
| 58 | Amino acid sequence from NMEC strain IHE3034 with an E1305A point |
| | mutation |
| 59 | Amino acid sequence from EAEC strain 101-1 (GI: 83587587) with an E1305A |
| | point mutation |
| 60 | Amino acid sequence from UPEC strain 536 (GI: 110643204) with an E1305A |
| | point mutation |
| 61 | Amino acid sequence from EIEC strain 53638 (GI: 75515237) with an E1305A |
| | point mutation |
| 62 | Amino acid sequence from ETEC strain B7A (GI: 75227618) with an E1305A |
| | point mutation |
| 63 | Amino acid sequence from EPEC strain E110019 (GI: 75239450) with an |
| | E1305A point mutation |
| 64 | Amino acid sequence from EPEC strain E22 (GI: 75259912) with an E1305A |
| | point mutation |
| 65 | Amino acid sequence from ETEC strain E24377A (GI: 157156747) with an |
| | E1305A point mutation |
| 66 | Amino acid sequence from UPEC strain F11 (GI: 75241179) with an E1305A |
| | point mutation |
| 67 | Amino acid sequence from ETEC strain H10407 with an E1305A point |
| | mutation |
| 68 | Amino acid sequence from EAEC strain O42 with an E1305A point mutation |
| 69 | Amino acid sequence from commensal strain HS (GI: 157162442) with an |
| | E1305A point mutation |
| 70 | Amino acid sequence from commensal strain W3110 (GI: 89109748) with an |
| | E1305A point mutation |
| 71 | Amino acid sequence from antibiotic-resistant strain SECEC with an E1305A |
| | point mutation |
| 72 | Amino acid sequence from EPEC strain E2348/69 with an E1305A point |
| | mutation |
| 73 | Amino acid sequence from EAEC strain 55989 with an E1305A point mutation |
| 74 | Amino acid sequence from UPEC strain IAI39 with an E1305A point mutation |
| 75 | Amino acid sequence from UPEC strain UMN026 with an E1305A point |
| | mutation |
| 76 | Amino acid sequence from NMEC strain S88 with an E1305A point mutation |
| | SEQ ID NOs: 77-95 = orf3526C fragment amino acid sequences |
| 77 | Amino acid sequence from NMEC strain IHE3034 with the N-terminal ΔG |
| | region and the C-terminal portion including the zinc-binding motif deleted |
| 78 | Amino acid sequence from EAEC strain 101-1 (GI: 83587587) with the N- |
| | terminal ΔG region and the C-terminal portion including the zinc-binding motif |
| | deleted |
| 79 | Amino acid sequence from UPEC strain 536 (GI: 110643204) with the N- |
| | terminal ΔG region and the C-terminal portion including the zinc-binding motif |
| | deleted |
| 80 | Amino acid sequence from EIEC strain 53638 (GI: 75515237) with the N- |
| | terminal ΔG region and the C-terminal portion including the zinc-binding motif |
| | deleted |
| 81 | Amino acid sequence from ETEC strain B7A (GI: 75227618) with the N- |
| | terminal ΔG region and the C-terminal portion including the zinc-binding motif |
| | deleted |
| 82 | Amino acid sequence from EPEC strain E110019 (GI: 75239450 with the N- |
| | terminal ΔG region and the C-terminal portion including the zinc-binding motif |
| | deleted |
| 83 | Amino acid sequence from EPEC strain E22 (GI: 75259912) with the N- |
| | terminal ΔG region and the C-terminal portion including the zinc-binding motif |
| | deleted |
| 84 | Amino acid sequence from ETEC strain E24377A (GI: 157156747) with the N- |
| | terminal ΔG region and the C-terminal portion including the zinc-binding motif |
| | deleted |
| 85 | Amino acid sequence from UPEC strain F11 (GI: 75241179) with the N- |
| | terminal ΔG region and the C-terminal portion including the zinc-binding motif |
| | deleted |
| 86 | Amino acid sequence from ETEC strain H10407 with the N-terminal ΔG region |
| | and the C-terminal portion including the zinc-binding motif deleted |
| 87 | Amino acid sequence from EAEC strain O42 with the N-terminal ΔG region |
| | and the C-terminal portion including the zinc-binding motif deleted |
| 88 | Amino acid sequence from commensal strain HS (GI: 157162442) with the N- |
| | terminal ΔG region and the C-terminal portion including the zinc-binding motif |
| | deleted |
| 89 | Amino acid sequence from commensal strain W3110 (GI: 89109748) with the |
| | N-terminal ΔG region and the C-terminal portion including the zinc-binding |
| | motif deleted |
| 90 | Amino acid sequence from antibiotic-resistant strain SECEC with the N- |
| | terminal ΔG region and the C-terminal portion including the zinc-binding motif |
| | deleted |
| 91 | Amino acid sequence from EPEC strain E2348/69 with the N-terminal ΔG |
| | region and the C-terminal portion including the zinc-binding motif deleted |
| 92 | Amino acid sequence from EAEC strain 55989 with the N-terminal ΔG region |
| | and the C-terminal portion including the zinc-binding motif deleted |
| 93 | Amino acid sequence from UPEC strain IAI39 with the N-terminal ΔG region |
| | and the C-terminal portion including the zinc-binding motif deleted |
| 94 | Amino acid sequence from UPEC strain UMN026 with the N-terminal ΔG |
| | region and the C-terminal portion including the zinc-binding motif deleted |
| 95 | Amino acid sequence from NMEC strain S88 with the N-terminal ΔG region |
| | and the C-terminal portion including the zinc-binding motif deleted |
| 96/97 | Zinc binding motifs |
| 98-109 | Primers |
| 110-111 | IC31 sequences |

### MODES FOR CARRYING OUT THE INVENTION

[0291] One of the antigens disclosed in reference 5 is annotated as accessory colonization factor D (AcfD) precursor (orf3526) (amino acid SEQ ID NO: 2 herein) from NMEC strain IHE3034. This protein has been expressed and purified, and it confers protection against ExPEC strains in a sepsis animal model.

[0292] Sequences were obtained for the orthologs in various other E. coli strains. The amino acid sequence seen in IHE3034 was also seen in strains APECO1 and UTI89, but 14 extra sequences were found (SEQ ID NOs: 3 to 16). FIG. 1 shows an alignment of SEQ ID NOs: 2 to 16. The 30 N-terminal amino acids are 100% conserved, and these include the signal peptide (aa 1-23) and the N-terminus cysteine of the native lipoprotein.

[0293] Some strains had a frameshift mutation in the AcfD (orf3526) gene, resulting in no expression of the polypeptide. The acfD gene was totally absent from strains CFT073, EDL933, Sakai and B171.

[0294] FIG. 2 shows the % identity between the amino acid sequences. The labels are SEQ ID NOs, except for MG1655, RS218, DH10B, APECO1 and UTI89 where the strain name is used. The lowest level of identity (boxed in FIG. 2) was 85.9%, between SEQ ID NOs: 2 and 4 (both ExPEC strains).

### Example 1

### Immunogenicity of the Full Length AcfD (orf3526)

[0295] The AcfD (orf3526) sequence from strain IHE3034 was cloned and expressed from a plasmid as a recombinant His-tagged protein without a leader peptide, in an E. coli host. Protein was purified and analysed. Gel filtration showed a much higher molecular weight than predicted based solely on the amino acid sequence. Gel analysis in the absence of DTT, but not in its presence, shows higher molecular weight forms of the protein (FIG. 3). Thus the protein is likely to form oligomers.

[0296] Sera raised against AcfD (orf3526) were used in western blots against total cell lysates (FIG. 4(A)) or culture supernatants precipitated with 60% TCA (FIG. 4(B)). The sera recognised a ˜150 kDa protein in lysates from both pathogenic and commensal strains. They did not react with this band in lysates from CFT073 or from an AcfD (orf3526) knockout mutant of IHE3034. Reactivity with proteins in the supernatants indicates that the protein may be secreted.

[0297] CD1 mice (5 weeks old) were immunized sub-cutaneously using 20 μg of the antigen plus Freund's adjuvant (or other adjuvant as indicated below). The mice were inoculated at 0, 21, and 35 days. Fourteen days after the third inoculation, the mice were challenged with a lethal dose (LD80) of a pathogenic strain of E. coli. Blood was collected from the tail 24 hours after challenge to evaluate bacteremia. The mortality was monitored for four days post-challenge. The protection rate may be calculated as (% dead in control group (no immunization)−% dead in experimental group (immunized))/% dead in control group×100.

TABLE 1

| | Sepsis animal model | | |
|---|---|---|---|
| | Survival with | Survival without | |
| Candidates | vaccination (%) | vaccination (%) | P value |
| 20 μg 3526/alum | 64/78 (82) | 9/80 (11) | 0.0001 |

[0298] Thus, the AcfD precursor (orf3526) is an effective candidate for use as a vaccine or vaccine component.

[0299] To further demonstrate the utility of the AcfD precursor (orf3526) as a candidate for a vaccine or a vaccine component, the AcfD precursor (orf3526) was tested for its ability to provide cross protection against other pathogenic strains of E. coli using the animal sepsis model as indicated above. The results of these tests are indicated in Table 2 below (with the results from Table I included for comparison purposes).

TABLE 2

| 20 μg 3526/alum | | | |
|---|---|---|---|
| Challenge Strain | Sepsis animal model | | |
| (percent identity to | Survival with | Survival without | |
| IHE3034) | vaccination (%) | vaccination (%) | P value |
| IHE3034 (100) | 64/78 (82) | 9/80 (11) | 0.0001 |
| 9855/93 (87) | 9/16 (56) | 4/15 (26) | 0.14 |
| BK658 (98) | 4/8 (50) | 1/8 (12.5) | 0.28 |
| B616 (100C) | 6/8 (78) | 0/8 (0) | 0.007 |
| 536 (86) | 6/7 (85) | 3/8 (37.5) | 0.11 |

Thus, the AcfD precursor (orf3526) is an effective candidate for use as a vaccine or vaccine component not just against the strain from which the protein was derived, but also against related strains, thus increasing the utility. Based upon the similarity between the response to the AcfD precursor (orf3526) and the response to the three immunogenic fragments tested below (3526A, 3526B, and 3526C), one would expect that these three fragments would provide similar cross protection as well.

### Example 2

### Fragments of AcfD (orf3526) with Increased Solubility

[0300] Unexpectedly, AcfD (orf3526) protein displayed low solubility even though the protein is a secreted protein. As shown in FIG. 5(B), removal of the N-terminus of AcfD (orf3526) through the gly-ser linker or gly-ser region significantly increased solubility when expressed at 25° C. (See pK1-ΔG3526 FIG. 5(B)). Similarly removal of the N-terminus of AcfD (orf3526) through the proline rich region significantly increased solubility when expressed at 25° C. (See pK1-ΔP3526 FIG. 5(B)).

[0301] To confirm that both fragments had substantially the same immunogenicity as the full length AcfD (orf3526), the fragments were purified. The purified fragments were used in three immunization experiments in mice, adjuvanted with Freund's complete adjuvant. Immunized mice were then challenged with a sublethal dose of E. coli. Immunization with AcfD (orf3526) with the N-terminus through the gly-ser linker or gly-ser region removed protected 100% of the mice from death, whereas death occurred in 90% of the animals in the non-immunized control group. Immunization with AcfD (orf3526) with the N-terminus through the proline rich region removed protected 90% of the mice from death, whereas death occurred in 90% of the animals in the non-immunized control group.

[0302] Expression and Purification

[0303] Bacteria with one of the three constructs expressing his-tagged variants of AcfD (orf3526) were cultured in 30 ml of medium and induced to express the AcfD (orf3526) variant at 25° C. (AcfD (orf3526) without the leader peptide (3526), AcfD (orf3526) with the N-terminus removed through the gly-ser linker or gly-ser region (ΔG3526), and AcfD (orf3526) with the N-terminus removed through the proline rich region (ΔP3526). The bacteria were harvested and lysed by sonication. The soluble fractions were isolated and loaded on an IMAC column. The column was washed three times with 20 mM imidazole buffer. The AcfD (orf3526) variants were then eluted with three washes of 500 mM imidazole buffer. As shown in FIG. 6, removal of the N-terminus of AcfD (orf3526) through the gly-ser linker or gly-ser region significantly increased solubility and yield of purified protein. The yield obtained was estimated by Bradford assay to be as follows: 0.18 mg of 3526 and 2.34 mg ΔG3526.

### Example 3

### AcfD (orf3526) Mutants with Reduced Toxicity

[0304] A zinc binding motif was identified in the AcfD (orf3526) protein (See FIG. 8). The zincin zinc metalloprotease motif is also found in StcE (Secreted protease of C1 esterase inhibitor from EHEC) which is a protein secreted by EHEC that is involved in the pathogenesis of such E. coli.

| (SEQ ID NO: 96) | |
|---|---|
| StcE | HEVGHNYGLGH |
| (SEQ ID NO: 97) | |
| AcfD (orf3526) | HEVGHNAAETP |

Given that this motif is conserved in all variants of AcfD (orf3526) and EHEC was the only pathotype in which AcfD (orf3526) was not identified, it was surmised that AcfD (orf3526) similarly is a zinc metalloprotease involved in the pathogenicity of the E. coli pathotypes in which it is expressed and secreted. Therefore, inactivation of the toxicity of AcfD (orf3526) was sought. One of skill in the art would have no difficulty in modifying AcfD (orf3526) to inactivate the metalloprotease. As the Glu residue of the motif is known to be most important to catalytic activity while the two His residues coordinate the Zinc, the Glu was mutated to Ala as an exemplary mutation inactivating the metalloprotease activity—SEQ ID NOs: 58-76 (See, e.g., Microbiology and Molecular Biology Reviews, September 1998, p. 597-635, Vol. 62, No. 3). In addition, two additional detoxified variants were designed: one with the C-terminus deleted—SEQ ID NOs: 20-38, and one with the N-terminus deleted—SEQ ID NOs: 39-57.

[0305] Test of In Vitro Toxicity of Full Length AcfD (orf3526)

[0306] Two different cell lines were tested for their ability to assay toxicity of the AcfD (orf3526) protein: human bone marrow endothelial cells (HBMEC) and Chinese hamster ovary cells (CHO cells). For HBMEC, the effect of increasing doses of AcfD (orf3526) protein (0.1 μg/ml, 1 μg/ml, and 10 μg/ml) was compared to TNF-α (as a positive control). The TNF-α treated cells showed an average of ˜22.5% cell death (average of three experiments) while the highest dose of AcfD (orf3526) protein showed only an average of ˜5% cell death (average of three experiments) as compared to the negative control which showed only an average of ˜2.5% cell death (average of three experiments). For CHO cells, the effect of increasing doses of AcfD (orf3526) protein (1 μg/ml, 10 μg/ml, and 100 μg/ml) was compared to TNF-α (as a positive control) by measuring the change in potential difference over time due to the alteration of the cytoskeleton of the CHO cells. At the highest level of AcfD (orf3526) protein test, a significant decrease was detected after 46 hours, but the decrease in response to TNF-α was notably greater.

[0307] Thus, while a preferred test for toxicity with a strong signal has not been identified, the fragments identified below still have significant utility. As discussed above, these three fragment should provide a similar degree of cross protection as the full length version tested above. Furthermore, commensal E. coli is a preferred strain for expression of AcfD (orf3526) protein. However, as indicated FIG. 4, commensal E. coli express a version of AcfD (orf3526) protein, but do not secrete the protein. Thus, expression of a fragment of an AcfD (orf3526) protein provides the advantage of allowing separation of the fragment from the endogenous AcfD (orf3526) protein based upon the size difference without needing an affinity purification tag.

[0308] Cloning and Expression-3526A and 3526B

[0309] Mutants were obtained using GeneTailor site-directed mutagenesis system (Invitrogen). Genes were cloned in pET-21b vectors (Novagen) and transformed in DH5α-T1 chemically competent cells for propagation (Invitrogen). BL21 (DE3) chemically competent cells were used for expression. All candidates were cloned and expressed without the signal sequence and as his-tag fusion proteins, being purified by affinity chromatography.

### Primers Used for Amplification of Fragments (Final Column is SEQ ID NO:):

| | | | | |
|---|---|---|---|---|
| 3526A | 3526F | GGAATTCCATATGTGTGATGGTGGTGG | NdeI | 98 |
| | | TTCA | | |
| | 3526AR | CCGCTCGAGGTTGTTCACCACCGATTT | XhoI | 99 |
| 3526B | 3526BF | GGAATTCCATATGGATCCGCAAGGGTA | NdeI | 100 |
| | | TCC | | |
| | 3526R | CCGCTCGAGCTCGGCAGACATCTTATG | XhoI | 101 |

### Primers Used for Mutation:

| | Oligo | Nucleotide sequence | |
|---|---|---|---|
| Sample | name | (5′ - 3′) | |
| 3526E1305A | 3526GTF1 | ACGACTGGCTGATTTGGCACGCAGTC | 102 |
| | | GGTCATA | |
| | 3526GTR1 | GTGCCAAATCAGCCAGTCGTTCAGCG | 103 |
| | | GCGT | |

[0312] Immunogenicity-3526A and 3526B

[0313] To confirm that both fragments and the point mutation had substantially the same immunogenicity as the full length AcfD (orf3526), the fragments were purified. The purified fragments were used in three immunization experiments in mice, adjuvanted with Freund's complete adjuvant. Immunized mice were then challenged with a lethal dose of E. coli. Results of the challenge are shown in Table 3 below.

TABLE 3

| | Sepsis animal model | | |
|---|---|---|---|
| | Survival with | Survival without | |
| Candidates | vaccination (%) | vaccination (%) | P value |
| 3526A (AcfD - C-term | 7/8 (87.5) | 1/8 (12.5) | 0.01 |
| deletion) | | | |
| 3526B (AcfD - N-term | 6/8 (75) | 1/8 (12.5) | 0.04 |
| deletion) | | | |

[0314] Cloning and Expression-ΔG3526C

[0315] As an additional confirmation, a construct was designed that combined the ΔG3526 N-terminal deletion that improved solubility with deletion of the C-terminus through the zinc motif (ΔG3526C). Exemplary constructs are provided as SEQ ID NOs: 77 to 95.

[0316] A non-his-tagged expression vector for the ΔG3526C (E. coli strain IHE3034—SEQ ID NO:77) construct was obtained by PCR using the primers indicated below (ΔG3526A/C_For and ΔG3526C NatRev). The amplified PCR fragment was digested with NdeI and XhoI and ligated into a pET-24b(+) vector (Novagen) and transformed in DH5α-T1 chemically competent cells for propagation (Invitrogen). BL21 (DE3) chemically competent cells were used for expression.

[0317] A his-tagged expression vector for the ΔG3526C (E. coli strain IHE3034—SEQ ID NO:77) construct was obtained using Polymerase Incomplete Primer Extension (PIPE) using the primers indicated below (ΔG3526A/C_For and ΔG3526C Nat for I-PCR and p-pet1 and pet3 for V-PCR of the pET-21b vector (Novagen)). The expression vector was transformed in DH5α-T1 chemically competent cells for propagation (Invitrogen). BL21 (DE3) chemically competent cells were used for expression.

[0318] The his-tagged version of ΔG3526C was expressed (See, e.g., FIG. 10) without the signal sequence and purified by affinity chromatography based upon the his-tag.

### Primers Used for Amplification of the Non-his-Tagged Fragment (SEQ ID NOs: 104 & 105)

| | | |
|---|---|---|
| ΔG3526C | ΔG3526A/C_For | gaaggagatatacatatgGATACGCCGTCTGTAGATTCTGG |
| | (NdeI) | |
| | ΔG3526C_NatRev | gtggtggtgctcgagTTACCAAATCAGCCAGTCGTTCAGC |
| | (XhoI) | |

Primers Used for Amplification of the his-Tagged Fragment (I-PCR): SEQ ID NOs: 106 & 107

| | | |
|---|---|---|
| ΔG3526C | ΔG3526A/C_For | gaaggagatatacatatgGATACGCCGTCTGTAGATTCTGG |
| | (NdeI) | |
| | ΔG3526C_Rev | gtggtggtgctcgagCCAAATCAGCCAGTCGTTCAGC |
| | (XhoI) | |

### Primers Used for Amplification of the Expression Vector (V-PCR): SEQ ID NOs: 108 & 109

| | | |
|---|---|---|
| pET-21b | p-pet1 | catatgatatctccttcttaaagTTAAACAAAATT |
| | | ATTTCTAG |
| | p-pet3 | CTCGAGCACCACCACCAC |

[0321] Immunogenicity-ΔG3526C

[0322] To confirm that the additional fragment had substantially the same immunogenicity as the full length AcfD (orf3526), the fragment was purified. The purified fragment was then tested as follows. Two groups of 8 CD1 mice (4 weeks old) were immunized s.c. with three doses of antigen ΔG3526C (either 2 μg or 20 μg), formulated in Alum at days 0, 31 and 35. 14 days after last immunization (11 weeks old mice) mice were infected i.p. with pathogenic E. coli strain IHE3034. Blood was collected from the tail after 24 hours to evaluate bacteremia. Mortality was monitored for 4 days after the infection. Protection was calculated as % survival at day 4 and statistical analysis was carried out by Fisher's exact test. Results of the challenge are shown in Table 4 below.

TABLE 4

| | Sepsis animal model | | |
|---|---|---|---|
| Candidate: | Survival with | Survival without | |
| ΔG3526C | vaccination (%) | vaccination (%) | P value |
| 2 μg/alum | 13/16 (81) | 0/7 (0) | 0.0005 |
| 20 μg/alum | 15/16 (93) | 0/7 (0) | 0.0001 |

[0323] Cross-Strain Immunogenicity-ΔG3526C

[0324] To further confirm the utility of the additional fragment in providing protection against multiple strains, the purified fragment was further tested as follows. CD1 mice (4 weeks old) were immunized s.c. with three doses of antigen ΔG3526C (either 10 μg or 20 μg), formulated in Alum at days 0, 31 and 35. 14 days after last immunization (11 weeks old mice) mice were infected i.p. with the pathogenic E. coli strain as indicated on Table 5. Blood was collected from the tail after 24 hours to evaluate bacteremia. Mortality was monitored for 4 days after the infection. Protection was calculated as % survival at day 4 and statistical analysis was carried out by Fisher's exact test. Results of the challenge are shown in Table 5 below.

TABLE 5

| Challenge Strain | Candidate ΔG3526C with Alum | |
|---|---|---|
| (infectious dose) | 20 μg/alum | 10 μg/alum |
| IHE3034 | Survival: 15/16 (93%) | Survival: 6/8 (75%) |
| (1 × 10⁷ CFU) | PE: 93% | PE: 75% |
| 536 | Survival: 5/8 (62.5%) | Survival: 6/8 (75%) |
| (1 × 10⁷ CFU i.v.) | PE: 50% | PE: 66% |
| 9855/93 | | Survival: 23/47 (49%) |
| (1 × 10⁷ CFU) | | PE: 39% |
| B616 | Survival: 6/8 (75%) | Survival: 22/24 (91%) |
| (2.5 × 10⁷ CFU) | PE: 66% | PE: 87% |
| UR41/S | | Survival: 4/8 (50%) |
| (2.5 × 10⁷ CFU) | | PE: 50% |
| UR40/R | Survival: 5/8 (62.5%) | % |
| (5 × 10⁶ CFU) | PE: 62.5% | |
| IN22/R | Survival: 7/8 (87.5%) | |
| (1 × 10⁷ CFU) | PE: 80% | |

It will be understood that the invention has been described by way of example only and modifications may be made whilst remaining within the scope and spirit of the invention.

### REFERENCES

### The Contents of which are Hereby Incorporated in Full

[0325] [1] Kaper et al. (2004) Nat Rev Microbiol. 2(2):123-40.
[0326] [2] Anjum et al. (2007) Appl Environ Microbiol 73 :5692-7.
[0327] [3] Russo & Johnson (2000) J Infect Dis 181:1753-1754.
[0328] [4] Smith et al. (2007) Foodborne Pathogens And Disease 4:134-63.
[0329] [5] WO2006/089264.
[0330] [6] WO2006/091517.
[0331] [7] Needleman & Wunsch (1970) J. Mol. Biol. 48, 443-453.
[0332] [8] Rice et al. (2000) Trends Genet 16:276-277.
[0333] [9] Geysen et al. (1984) PNAS USA 81:3998-4002.
[0334] [10] Carter (1994) Methods Mol Biol 36:207-23.
[0335] [11] Jameson, B A et al., 1988, CABIOS 4(1):181-186.
[0336] [12] Raddrizzani & Hammer (2000) Brief Bioinform 1(2):179-89.
[0337] [13] Bublil et al. (2007) Proteins 68(1):294-304.
[0338] [14] De Lalla et al. (1999) J. Immunol. 163:1725-29.
[0339] [15] Kwok et al. (2001) Trends Immunol 22:583-88.
[0340] [16] Brusic et al. (1998) Bioinformatics 14(2):121-30
[0341] [17] Meister et al. (1995) Vaccine 13(6):581-91.
[0342] [18] Roberts et al. (1996) AIDS Res Hum Retroviruses 12(7):593-610.
[0343] [19] Maksyutov & Zagrebelnaya (1993) Comput Appl Biosci 9(3):291-7.
[0344] [20] Feller & de la Cruz (1991) Nature 349(6311):720-1.
[0345] [21] Hopp (1993) Peptide Research 6:183-190.
[0346] [22] Welling et al. (1985) FEBS Lett. 188:215-218.
[0347] [23] Davenport et al. (1995) Immunogenetics 42:392-297.
[0348] [24] Tsurui & Takahashi (2007) J Pharmacol Sci. 105(4):299-316.
[0349] [25] Tong et al. (2007) Brief Bioinform. 8(2):96-108.
[0350] [26] Schirle et al. (2001) J Immunol Methods. 257(1-2):1-16.
[0351] [27] Chen et al. (2007) Amino Acids 33(3):423-8.
[0352] [28] U.S. Pat. No. 5,707,829
[0353] [29] Current Protocols in Molecular Biology (F. M. Ausubel et al. eds., 1987) Supplement 30.
[0354] [30] Vaccine Design: The Subunit and Adjuvant Approach (eds. Powell & Newman) Plenum Press 1995 (ISBN 0-306-44867-X).
[0355] [31] Vaccine Adjuvants: Preparation Methods and Research Protocols (Volume 42 of Methods in Molecular Medicine series). ISBN: 1-59259-083-7. Ed. O'Hagan.
[0356] [32] U.S. Pat. No. 6,355,271.
[0357] [33] WO00/23105.
[0358] [34] WO90/14837.
[0359] [35] WO90/14837.
[0360] [36] Podda & Del Giudice (2003) Expert Rev Vaccines 2:197-203.
[0361] [37] Podda (2001) Vaccine 19: 2673-2680.
[0362] [38] Vaccine Design: The Subunit and Adjuvant Approach (eds. Powell & Newman) Plenum Press 1995 (ISBN 0-306-44867-X).
[0363] [39] Vaccine Adjuvants: Preparation Methods and Research Protocols (Volume 42 of Methods in Molecular Medicine series). ISBN: 1-59259-083-7. Ed. O'Hagan.
[0364] [40] Allison & Byars (1992) Res Immunol 143:519-25.
[0365] [41] Hariharan et al. (1995) Cancer Res 55:3486-9.
[0366] [42] US-2007/014805.
[0367] [43] Suli et al. (2004) Vaccine 22(25-26):3464-9.
[0368] [44] WO95/11700.
[0369] [45] U.S. Pat. No. 6,080,725.
[0370] [46] WO2005/097181.
[0371] [47] WO2006/113373.
[0372] [48] Han et al. (2005) Impact of Vitamin E on Immune Function and Infectious Diseases in the Aged at Nutrition, Immune functions and Health EuroConference, Paris, 9-10 Jun. 2005.
[0373] [49] U.S. Pat. No. 6,630,161.
[0374] [50] U.S. Pat. No. 5,057,540.
[0375] [51] WO96/33739.
[0376] [52] EP-A-0109942.
[0377] [53] WO96/11711.
[0378] [54] WO00/07621.
[0379] [55] Barr et al. (1998) Advanced Drug Delivery Reviews 32:247-271.
[0380] [56] Sjolanderet et al. (1998) Advanced Drug Delivery Reviews 32:321-338.
[0381] [57] Niikura et al. (2002) Virology 293:273-280.
[0382] [58] Lenz et al. (2001) J Immunol 166:5346-5355.
[0383] [59] Pinto et al. (2003) J Infect Dis 188:327-338.
[0384] [60] Gerber et al. (2001) J Virol 75:4752-4760.
[0385] [61] WO03/024480.
[0386] [62] WO03/024481.
[0387] [63] Gluck et al. (2002) Vaccine 20:B10-B16.
[0388] [64] EP-A-0689454.
[0389] [65] Johnson et al. (1999) Bioorg Med Chem Lett 9:2273-2278.
[0390] [66] Evans et al. (2003) Expert Rev Vaccines 2:219-229.
[0391] [67] Meraldi et al. (2003) Vaccine 21:2485-2491.
[0392] [68] Pajak et al. (2003) Vaccine 21:836-842.
[0393] [69] Kandimalla et al. (2003) Nucleic Acids Research 31:2393-2400.
[0394] [70] WO02/26757.
[0395] [71] WO99/62923.
[0396] [72] Krieg (2003) Nature Medicine 9:831-835.
[0397] [73] McCluskie et al. (2002) FEMS Immunology and Medical Microbiology 32:179-185.
[0398] [74] WO98/40100.
[0399] [75] U.S. Pat. No. 6,207,646.
[0400] [76] U.S. Pat. No. 6,239,116.
[0401] [77] U.S. Pat. No. 6,429,199.
[0402] [78] Kandimalla et al. (2003) Biochemical Society Transactions 31 (part 3):654-658.
[0403] [79] Blackwell et al. (2003) J Immunol 170:4061-4068.
[0404] [80] Krieg (2002) Trends Immunol 23:64-65.
[0405] [81] WO01/95935.
[0406] [82] Kandimalla et al. (2003) BBRC 306:948-953.
[0407] [83] Bhagat et al. (2003) BBRC 300:853-861.
[0408] [84] WO03/035836.
[0409] [85] WO01/22972.
[0410] [86] Schellack et al. (2006) Vaccine 24:5461-72.
[0411] [87] WO95/17211.
[0412] [88] WO98/42375.
[0413] [89] Beignon et al. (2002) Infect Immun 70:3012-3019.
[0414] [90] Pizza et al. (2001) Vaccine 19:2534-2541.
[0415] [91] Pizza et al. (2000) Int J Med Microbiol 290:455-461.
[0416] [92] Scharton-Kersten et al. (2000) Infect Immun 68:5306-5313.
[0417] [93] Ryan et al. (1999) Infect Immun 67:6270-6280.
[0418] [94] Partidos et al. (1999) Immunol Lett 67:209-216.
[0419] [95] Peppoloni et al. (2003) Expert Rev Vaccines 2:285-293.
[0420] [96] Pine et al. (2002) J Control Release 85:263-270.
[0421] [97] Tebbey et al. (2000) Vaccine 18:2723-34.
[0422] [98] Domenighini et al. (1995) Mol Microbiol 15:1165-1167.
[0423] [99] WO99/40936.
[0424] [100] WO99/44636.
[0425] [101] Singh et al] (2001) J Cont Release 70:267-276.
[0426] [102] WO99/27960.
[0427] [103] U.S. Pat. No. 6,090,406.
[0428] [104] U.S. Pat. No. 5,916,588.
[0429] [105] EP-A-0626169.
[0430] [106] WO99/52549.
[0431] [107] WO01/21207.
[0432] [108] WO01/21152.
[0433] [109] Andrianov et al. (1998) Biomaterials 19:109-115.
[0434] [110] Payne et al. (1998) Adv Drug Delivery Review 31:185-196.
[0435] [111] U.S. Pat. No. 4,680,338.
[0436] [112] U.S. Pat. No. 4,988,815.
[0437] [113] WO92/15582.
[0438] [114] Stanley (2002) Clin Exp Dermatol 27:571-577.
[0439] [115] Wu et al. (2004) Antiviral Res. 64(2):79-83.
[0440] [116] Vasilakos et al. (2000) Cell Immunol. 204(1):64-74.
[0441] [117] U.S. Pat. Nos. 4,689,338, 4,929,624, 5,238,944, 5,266,575, 5,268,376, 5,346,905, 5,352,784, 5,389,640, 5,395,937, 5,482,936, 5,494,916, 5,525,612, 6,083,505, 6,440,992, 6,627,640, 6,656,938, 6,660,735, 6,660,747, 6,664,260, 6,664,264, 6,664,265, 6,667,312, 6,670,372, 6,677,347, 6,677,348, 6,677,349, 6,683,088, 6,703,402, 6,743,920, 6,800,624, 6,809,203, 6,888,000 and 6,924,293.
[0442] [118] Jones (2003) Curr Opin Investig Drugs 4:214-218.
[0443] [119] WO03/011223.
[0444] [120] Johnson et al. (1999) Bioorg Med Chem Lett 9:2273-2278.
[0445] [121] Evans et al. (2003) Expert Rev Vaccines 2:219-229.
[0446] [122] WO2004/060308.
[0447] [123] WO2004/064759.
[0448] [124] U.S. Pat. No. 6,924,271.
[0449] [125] US2005/0070556.
[0450] [126] U.S. Pat. No. 5,658,731.
[0451] [127] U.S. Pat. No. 5,011,828.
[0452] [128] WO2004/87153.
[0453] [129] U.S. Pat. No. 6,605,617.
[0454] [130] WO02/18383.
[0455] [131] WO2004/018455.
[0456] [132] WO03/082272.
[0457] [133] Wong et al. (2003) J Clin Pharmacol 43(7):735-42.
[0458] [134] US2005/0215517.
[0459] [135] Dyakonova et al. (2004) Int Immunopharmacol 4(13):1615-23.
[0460] [136] FR-2859633.
[0461] [137] Signorelli & Hadden (2003) Int Immunopharmacol 3(8):1177-86.
[0462] [138] WO2004/064715.
[0463] [139] De Libero et al, Nature Reviews Immunology, 2005, 5: 485-496
[0464] [140] U.S. Pat. No. 5,936,076.
[0465] [141] Oki et al, J. Clin. Investig., 113: 1631-1640
[0466] [142] US2005/0192248
[0467] [143] Yang et al, Angew. Chem. Int. Ed., 2004, 43: 3818-3822
[0468] [144] WO2005/102049
[0469] [145] Goff et al, J. Am. Chem., Soc., 2004, 126: 13602-13603
[0470] [146] WO03/105769
[0471] [147] Cooper (1995) Pharm Biotechnol 6:559-80.
[0472] [148] WO99/11241.
[0473] [149] WO94/00153.
[0474] [150] WO98/57659.
[0475] [151] European patent applications 0835318, 0735898 and 0761231.
[0476] [152] Durant et al. (2007) Infect Immun 75:1916-25.
[0477] [153] WO02/081653.
[0478] [154] Donnelly et al. (1997) Annu Rev Immunol 15:617-648.
[0479] [155] Strugnell et al. (1997) Immunol Cell Biol 75(4):364-369.
[0480] [156] Cui (2005) Adv Genet. 54:257-89.
[0481] [157] Robinson & Torres (1997) Seminars in Immunol 9:271-283.
[0482] [158] Brunham et al. (2000) J Infect Dis 181 Suppl 3:S538-43.
[0483] [159] Svanholm et al. (2000) Scand J Immunol 51(4):345-53.
[0484] [160] DNA Vaccination—Genetic Vaccination (1998) eds. Koprowski et al. (ISBN 3540633928).
[0485] [161] Gene Vaccination: Theory and Practice (1998) ed. Raz (ISBN 3540644288).
[0486] [162] Findeis et al., Trends Biotechnol. (1993) 11:202
[0487] [163] Chiou et al. (1994) Gene Therapeutics: Methods And Applications Of Direct Gene Transfer. ed. Wolff
[0488] [164] Wu et al., J. Biol. Chem. (1988) 263:621
[0489] [165] Wu et al., J. Biol. Chem. (1994) 269:542
[0490] [166] Zenke et al., Proc. Natl. Acad. Sci. (USA) (1990) 87:3655
[0491] [167] Wu et al., J. Biol. Chem. (1991) 266:338
[0492] [168] Jolly, Cancer Gene Therapy (1994) 1:51
[0493] [169] Kimura, Human Gene Therapy (1994) 5:845
[0494] [170] Connelly, Human Gene Therapy (1995) 1:185
[0495] [171] Kaplitt, Nature Genetics (1994) 6:148
[0496] [172] WO 90/07936.
[0497] [173] WO 94/03622.
[0498] [174] WO 93/25698.
[0499] [175] WO 93/25234.
[0500] [176] U.S. Pat. No. 5,219,740.
[0501] [177] WO 93/11230.
[0502] [178] WO 93/10218.
[0503] [179] U.S. Pat. No. 4,777,127.
[0504] [180] GB Patent No. 2,200,651.
[0505] [181] EP-A-0345242.
[0506] [182] WO 91/02805.
[0507] [183] WO 94/12649.
[0508] [184] WO 93/03769.
[0509] [185] WO 93/19191.
[0510] [186] WO 94/28938.
[0511] [187] WO 95/11984.
[0512] [188] WO 95/00655.
[0513] [189] Curiel, Hum. Gene Ther. (1992) 3:147
[0514] [190] Wu, J. Biol. Chem. (1989) 264:16985
[0515] [191] U.S. Pat. No. 5,814,482.
[0516] [192] WO 95/07994.
[0517] [193] WO 96/17072.
[0518] [194] WO 95/30763.
[0519] [195] WO 97/42338.
[0520] [196] WO 90/11092.
[0521] [197] U.S. Pat. No. 5,580,859
[0522] [198] U.S. Pat. No. 5,422,120
[0523] [199] WO 95/13796.
[0524] [200] WO 94/23697.
[0525] [201] WO 91/14445.
[0526] [202] EP-0524968.
[0527] [203] Philip, Mol. Cell. Biol. (1994) 14:2411
[0528] [204] Woffendin, Proc. Natl. Acad. Sci. (1994) 91:11581
[0529] [205] U.S. Pat. No. 5,206,152.
[0530] [206] WO 92/11033.
[0531] [207] U.S. Pat. No. 5,149,655.
[0532] [208] Gennaro (2000) Remington: The Science and Practice of Pharmacy. 20th edition, ISBN: 0683306472.
[0533] [209] Methods In Enzymology (S. Colowick and N. Kaplan, eds., Academic Press, Inc.)
[0534] [210] Handbook of Experimental Immunology, Vols. I-IV (D. M. Weir and C. C. Blackwell, eds, 1986, Blackwell Scientific Publications)
[0535] [211] Sambrook et al. (2001) Molecular Cloning: A Laboratory Manual, 3rd edition (Cold Spring Harbor Laboratory Press).
[0536] [212] Handbook of Surface and Colloidal Chemistry (Birdi, K. S. ed., CRC Press, 1997)
[0537] [213] Ausubel et al. (eds) (2002) Short protocols in molecular biology, 5th edition (Current Protocols).
[0538] [214] Molecular Biology Techniques: An Intensive Laboratory Course, (Ream et al., eds., 1998, Academic Press)
[0539] [215] PCR (Introduction to Biotechniques Series), 2nd ed. (Newton & Graham eds., 1997, Springer Verlag)
[0540] [216] Current Protocols in Molecular Biology (F. M. Ausubel et al., eds., 1987) Supplement 30
[0541] [217] Smith & Waterman (1981) Adv. Appl. Math. 2: 482-489.

The application's sequence listing, which the Patent Office published only in electronic form, follows.

SEQUENCE LISTING (111 sequences)

SEQ ID NO: 1 - protein, 1520 aa, Escherichia coli
MNKKFKYKKSLLAAILSATLLAGCDGGGSGSSSDTPSVDSGSGTLPEVKPDPTPTPEPTPEPTPDPEPTPDPTPDPEPTPEPEPEPVPTKTGYLTLGGSQRVTGATCNGESSDGFTFTPGNTVSCVVGSTTIATFNTQSEAARSLRAVDKVSFSLEDAQELANSENKKTNAISLVTSSDSCPADAEQLCLTFSSVVDRARFEKLYKQIDLATDNFSKLVNEEVENNAATDKAPSTHTSTVVPVTTEGTKPDLNASFVSANAEQFYQYQPTEIILSEGQLVDSLGNGVAGVDYYTNSGRGVTDENGKFSFSWGETISFGIDTFELGSVRGNKSTIALTELGDEVRGANIDQLIHRYSTTGQNNTRVVPDDVRKVFAEYPNVINEIINLSLSNGATLDEGDQNVVLPNEFIEQFKTGQAKEIDTAICAKTDGCNEARWFSLTTRNVNDGQIQGVINKLWGVDTNYQSVSKFHVFHDSTNFYGSTGNARGQAVVNISNSAFPILMARNDKNYWLAFGEKRAWDKNELAYITEAPSIVQPENVTRDTATFNLPFISLGQVGEGKLMVIGNPHYNSILRCPNGYSWGGGVNSKGECTLSGDSDDMKHFMQNVLRYLSNDIWQPNTKSIMTVGTNLENVYFKKAGQVLGNSAPFAFHEDFTGITVKQLTSYGDLNPEEIPLLILNGFEYVTQWSGDPYAVPLRADTSKPKLTQQDVTDLIAYLNKGGSVLIMENVMSNLKEESASSFVRLLDAAGLSMALNKSVVNNDPQGYPDRVRQRRATGIWVYERYPAADGAQPPYTIDPNTGEVTWKYQQDNKPDDKPKLEVASWQEEVEGKQVTRYAFIDEAEYTTEESLEAAKAKIFEKFPGLQECKDSTYHYEINCLERRPGTDVPVTGGMYVPRYTQLNLDADTAKAMVQAADLGTNIQRLYQHELYFRTKGSKGERLNSVDLERLYQNMSVWLWNDTKYRYEEGKEDELGFKTFTEFLNCYANDAYAGGTKCSADLKKSLVDNNMIYGDGSSKAGMMNPSYPLNYMEKPLTRLMLGRSWWDLNIKVDVEKYPGSVSAKGESVTENISLYSNPTKWFAGNMQSTGLWAPAQQDVTIKSSASVPVTVTVALADDLTGREKHEVALNRPPRVTKTYTLEANGEVTFKVPYGGLIYIKGDSKDDVSANFTFTGVVKAPFYKDGEWKNDLDSPAPLGELESASFVYTTPKKNLEASNFTGGVAEFAKDLDTFASSMNDFYGRNDEDGKHRMFTYKNLTGHKHRFTNDVQISIGDAHSGYPVMNSSFSTNSTTLPTTPLNDWLIWHEVGHNAAETPLNVPGATEVANNVLALYMQDRYLGKMNRVADDITVAPEYLDESNGQAWARGGAGDRLLMYAQLKEWAEENFDIKQWYPDGELPKFYSDRKGMKGWNLFQLMHRKARGDDVGNSTFGGKNYCAESNGNAADTLMLCASWVAQADLSEFFKKWNPGASAYQLPGATEMSFQGGVSSSAYSTLASLKLPKPEKGPETINKVTEHKMSAE

SEQ ID NO: 2 - protein, 1521 aa, Escherichia coli
MNKKFKYKKSLLAAILSATLLAGCDGGGSGSSSDTPPVDSGTGSLPEVKPDPTPNPEPTPEPTPDPEPTPEPTPDPEPTPEPEPEPVPTKTGYLTLGGSQRITGATCNGESSDGFTFTPGDKVTCVAGNNTTIATFDTQSEAARSLRAVEKVSFSLEDAQELAASDDKKSNAVSLVTSSNSCPANTEQVCLTFSSVIESKRFDSLYKQIDLAPEEFKKLVNEEVENNAATDKAPSTHTSPVVPVTTPGTKPDLNASFVSANAEQFYQYQPTEIILSEGRLVDSMGNGVVGVNYYTSSGRGVTGENGKFNFSWGETISFGIDTFELGSVRGNKSTIALTELGDEVRGANIDQLIHRYSQAGKNDEREVPDVVRKVFAEYPNVINEIINLSLSNGEALSEGDQTFERTNEFLEQFESGQAKEIDTAICDSLGGCNSQRWFSLTARNVNEGQIQGVINKLWGVDKDYKSVTKFHVFHDSTNFYGSTGNARGQAVVNISNAAFPILMARNDKNYWLAFGEKRAWDKNELAYITEAPSLVEPENVTRDTATFNLPFISLGQVGEGKLMVIGNPHYNSILRCPNGYSWEGGVDKNGQCTRNSDSNDMKHFMQNVLRYLSDDKWTPDAKASMTVGTNLDTVYFKRHGQVTGNSAEFGFHPDFAGISVEHLSSYGDLDPQEMPLLILNGFEYVTQVGNDPYAIPLRADTSKPKLTQQDVTDLIAYLNKGGSVLIMENVMSNLKEESASGFVRLLDAAGLSMALNKSVVNNDPQGYPNRVRQQRATGIWVYERYPAVDGALPYTIDSKTGEVKWKYQVENKPDDKPKLEVASWLEDVDGKQETRYAFIDEADHKTEDSLKAAKAKIFEKFPGLKECKDPTYHYEVNCLEYRPGTGVPVTGGMYVPQYTQLSLNADTAKAMVQAADLGTNIQRLYQHELYFRTNGRKGERLSSVDLERLYQNMSVWLWNKIEYRYENDKDDELGFKTFTEFLNCYANDAYTGGTQCSDELKKSLVDNNMIYGEKSVNKAGMMNPSYPLNYMEKPLTRLMLGRSWWDLNIKVDVEKYPGAVSAEGEKVTETISLYSNPTKWFAGNMQSTGLWAPAQKEVTIESSASVPVTVTVALADDLTGREKHEVALNRPPKVTKTYELKANGEVKFTVPYGGLIYIKGNSPQNESAEFTFTGVVKAPFYKDGAWKNALNSPAPLGELESDAFVYTTPKKNLEASNFTGGVAEFAKDLDTFASSMNDFYGRNDEDGKHRMFTYKNLTGHKHRFTNDVQISIGDAHSGYPVMNSSFSTNSTTLPTTPLNDWLIWHEVGHNAAETPLTVPGATEVANNVLALYMQDRYLGKMNRVADDITVAPEYLEESNGQAWARGGAGDRLLMYAQLKEWAEKNFDIKQWYPEGDLPKFYSDREGMKGWNLFQLMHRKARGDEVGKTKFGERNYCAESNGNAADKLMLCASWVAQTDLSEFFKKWNPGANAYQLPGASEMNFEGGVSQSAYETLAALNLPKPQQGPETINQVTEHKMSAE

SEQ ID NO: 3 - protein, 1521 aa, Escherichia coli
MNKKFKYKKSLLAAILSATLLAGCDGGGSGSSSDTPPVDSGTGSLPEVKPDPTPNPEPTPEPTPDPEPTPEPTPDPEPTPEPEPEPVPTKTGYLTLGGSQRITGATCNGESSDGFTFTPGDKVTCVAGNNTTIATFDTQSEAARSLRAVEKVSFSLEDAQELAASDDKKSNAVSLVTSSNSCPADTEQVCLTFSSVIESKRFDSLYKQIDLAPEEFKKLVNEEVENNAATDKAPSTHTSPVVPVTTPGTKPDLNASFVSANAEQFYQYQPTEIILSEGRLVDSMGNGVVGVNYYTSSGRGVTGENGKFNFSWGETISFGIDTFELGSVRGNKSTIALTELGDEVRGANIDQLIHRYSQAGKNDEREVPDVVRKVFAEYPNVINEIINLSLSNGEALSEGDQTFERTNEFLEQFESGQAKEIDTAICDSLGGCNSQRWFSLTARNVNDGQIQGVINKLWGVDTNYKSVSKFHVFHDSTNFYGSTGNARGQAVVNISNAAFPILMARNDKNYWLAFGEKRAWDKNELAYITEAPSLVEPENVTRDTATFNLPFISLGQVGEGKLMVIGNPHYNSILRCPNGYSWEGGVDKNGQCTRNSDSNDMKHFMQNVLRYLSDDKWTPDAKASMTVGTNLDTVYFKRHGQVTGNSAEFGFHPDFAGISVEHLSSYGDLDPQEMPLLILNGFEYVTQVGNDPYAIPLRADTSKPKLTQQDVTDLIAYLNKGGSVLIMENVMSNLKEESASGFVRLLDAAGLSMALNKSVVNNDPQGYPNRVRQQRATGIWVYERYPAVDGALPYTIDSKTGEVKWKYQVENKPDDKPKLEVASWLEDVDGKQETRYAFIDEADHKTEDSLKAAKAKIFEKFPGLKECKDPTYHYEVNCLEYRPGTGVPVTGGMYVPQYTQLSLNADTAKAMVQAADLGTNIQRLYQHELYFRTNGRKGERLSSVDLERLYQNMSVWLWNKIEYRYENDKDDELGFKTFTEFLNCYANDAYTGGTQCSDELKKSLVDNNMIYGEKSVNKAGMMNPSYPLNYMEKPLTRLMLGRSWWDLNIKVDVEKYPGAVSAEGEKVTETISLYSNPTKWFAGNMQSTGLWAPAQKEVTIESTASVAVTVTVALADDLTGREKHEVALNRPPKVTKTYELKANGEVKFTVPYGGLIYIKGNSPQNESAEFTFTGVVKAPFYKDGAWKNALNSPAPLGELESDAFVYTTPKKNLEASNYKGGQEQFAEELDTFASSMNDFYGRNDEDGKHRMFTYKNLTGHKHRFTNDVQISIGDAHSGYPVMNSSFSTNSTTLPTTPLNDWLIWHEAGHNAAETPLTVPGATEVANNVLALYMQDRYLGKMNRVADDITVAPEYLEESNNQAWARGGAGDRLLMYAQLKEWAEKNFDITKWYPEGNLPKFYSEREGMKGWNLFQLMHRKARGDEVGKTKFGERNYCAESNGNAADTLMLCASWVAQTDLSAFFKKWNPGANAYQLPGASEMNFEGGVSQSAYETLAALNLPKPQQGPETINKVTEYSMPAE

SEQ ID NO: 4 - protein, 1520 aa, Escherichia coli
MNKKFKYKKSLLAAILSATLLAGCDGGGSGSSSDTPPVDSGTGSLPEVKPDPTPNPEPTPEPTPDPEPTPEPIPDPEPTPEPEPEPVPTKTGYLTLGGSQRVTGATCNGESSDGFTFKPGEDVTCVAGNTTIATFNTQSEAARSLRAVEKVSFSLEDAQELAGSDDKKSNAVSLVTSSNSCPANTEQVCLTFSSVIESKRFDSLYKQIDLAPEEFKKLVNEEVENNAATDKAPSTHTSPVVPVTTPGTKPDLNASFVSANAEQFYQYQPTEIILSEGRLVDSQGYGVAGVNYYTNSGRGVTGENGEFSFSWGETISFGIDTFELGSVRGNKSTIALTELGDEVRGANIDQLIHRYSTTGQNNTRVVPDDVRKVFAEYPNVINEIINLSLSNGATLGEGEQVVNLPNEFIEQFNTGQAKEIDTAICAKTDGCNEARWFSLTTRNVNDGQIQGVINKLWGVDTNYKSVSKFHVFHDSTNFYGSTGNARGQAVVNISNAAFPILMARNDKNYWLAFGEKRAWDKNELAYITEAPSLVEPENVTRDTATFNLPFISLGQVGEGKLMVIGNPHYNSILRCPNGYSWNGGVNKDGQCTLNSDPDDMKNFMENVLRYLSDDKWKPDAKASMTVGTNLDTVYFKRHGQVTGNSAAFDFHPDFAGISVEHLSSYGDLDPQEMPLLILNGFEYVTQVGNDPYAIPLRADTSKPKLTQQDVTDLIAYLNKGGSVLIMENVMSNLKEESASGFVRLLDAAGLSMALNKSVVNNDPQGYPNRVRQQRATGIWVYERYPAVDGALPYTIDSKTGEVKWKYQVENKPDDKPKLEVASWLEDVDGKQETRYAFIDEADHKTEDSLKAAKEKIFAAFPGLKECTNPAYHYEVNCLEYRPGTGVPVTGGMYVPQYTQLSLNADTAKAMVQAADLGTNIQRLYQHELYFRTNGRKGERLSSVDLERLYQNMSVWLWNDTSYRYEEGKNDELGFKTFTEFLNCYANDAYAGGTKCSADLKKSLVDNNMIYGDGSSKAGMMNPSYPLNYMEKPLTRLMLGRSWWDLNIKVDVEKYPGAVSEEGQNVTETISLYSNPTKWFAGNMQSTGLWAPAQKEVTIKSNANVPVTVTVALADDLTGREKHEVALNRPPRVTKTYSLDASGTVKFKVPYGGLIYIKGNSSTNESASFTFTGVVKAPFYKDGAWKNDLNSPAPLGELESDAFVYTTPKKNLNASNYTGGLEQFANDLDTFASSMNDFHGRDSEDGKHRMFTYKNLPGHKHRFTNDVQISIGDAHSGYPVMNSSFSPNSTTLPTTPLNDWLIWHEVGHNAAETPLTVPGATEVANNVLALYMQDRYLGKMNRVADDITVAPEYLEESNNQAWARGGAGDRLLMYAQLKEWAEKNFDIKKWYPDGTPLPEFYSEREGMKGWNLFQLMHRKARGDEVSNDKFGGKNYCAESNGNAADTLMLCASWVAQTDLSEFFKKWNPGANAYQLPGASEMSFEGGVSQSAYNTLASLDLPKPEQGPETINQVTEHKMSAE

SEQ ID NO: 5 - protein, 1522 aa, Escherichia coli
MNKKFKYKKSLLAAILSATLLAGCDGGGSGSSSDTPPVDSGTGSLPEVKPDPTPNPEPTPEPTPDPEPTPEPTPDPEPTPEPEPEPVPTKTGYLTLGGSLRVTGDITCNDESSDGFTFTPGDKVTCVAGNNTTIATFDTQSEAARSLRAVEKVSFSLEDAQELAGSDNKKSNALSLVTSMNSCPANTEQVCLEFSSVIESKRFDSLYKQIDLAPEEFKKLVNEEVENNAATDKAPSTHTSPVVPVTTPGTKPDLNASFVSANAEQFYQYQPSEIILSEGRLVDSQGYGVAGVNYYTNSGRGVTGENGEFSFSWGETISFGIDTFELGSVRGNKSTIALTELGDEVRGANIDQLIHRYSTTGQNNTRVVPDDVRKVFAEYPNVINEIINLSLSNGATLDEGEQVVNLPNEFIEQFKTGQAKEIDTAICAKTDGCNEARWFSLTTRNVNDGQIQGVINKLWGVDTNYKSVSKFHVFHDSTNFYGSTGNARGQAVVNISNAAFPILMARNDKNYWLAFGEKRAWDKNELAYITEAPSLVEPENVTRDTATFNLPFISLGQVGEGKLMVIGNPHYNSILRCPNGYSWNGGVNKDGQCTLNSDPDDMKNFMENVLRYLSDDKWTPDAKASMTVGTNLDTVYFKRHGQVTGNSAAFDFHPDFAGISVEHLSSYGDLDPQEMPLLILNGFEYVTQVGNDPYAIPLRADTSKPKLTQQDVTDLIAYLNKGGSVLIMENVMSNLKEESASGFVRLLDAAGLSMALNKSVVNNDPQGYPNRVRQQRATGIWVYERYPAVDGALPYTIDSKTGEVKWKYQVENKPDDKPKLEVASWLEDVDGKQETRYAFIDEADHKTEDSLKAAKEKIFAAFPGLKECTNPAYHYEVNCLEYRPGTGVPVTGGMYVPQYTQLSLNADTAKAMVQAADLGTNIQRLYQHELYFRTNGRKGERLSCVDLERLYQNMSVWLWNDTSYRYEEGKNDELGFKTFTEFLNCYANDAYAGGTKCSADLKKSLVDNNMIYGDGSSKAGMMNPSYPLNYMEKPLTRLMLGRSWWDLNIKVDVEKYPGAVSEEGQNVTETISLYSNPTKWFAGNMQSTGLWAPAQKEVTIKSNANVPVTVTVALADDLTGREKHEVALNRPPRVTKTYSLDASGTVKFKVPYGGLIYIKGNSSTNESASFTFTGVVKAPFYKDGAWKNDLNSPAPLGELESDAFVYTTPKKNLNASNYTGGLEQFANDLDTFASSMNDFYGRDSEDGKHRMFTYKNLPGHKHRFANDVQISIGDAHSGYPVMNSSFSPNSTTLPTTPLNDWLIWHEVGHNAAETPLTVPGATEVANNVLALYMQDRYLGKMNRVADDITVAPEYLEESNGQAWARGGAGDRLLMYAQLKEWAEKNFDIKKWYPDGTPLPEFYSEREGMKGWNLFQLMHRKARGDEVSNDKFGGKNYCAESNGNAADTLMLCASWVAQTDLSEFFKKWNPGANAYQLPGASEMSFEGGVSQSAYNTLASLKLPKPEQGPETINKVTEHKMSVE

SEQ ID NO: 6 - protein, 1520 aa, Escherichia coli
MNKKFKYKKSLLAAILSATLLAGCDGGGSGSSSDTPPVDSGTGSLPEVKPDPTPNPEPTPEPTPDPEPTPEPTPDPEPTPEPEPEPVPTKTGYLTLGGSLRVTGDITCNDESSDGFTFTPGDKVTCVAGNNTTIATFDTQSEAARSLRAVEKVSFSLEDAQELAGSDNKKSNALSLVTSMNSCPANTEQVCLEFSSVIESKRFDSLYKQIDLAPEEFKKLVNEEVENNAATDKAPSTHTSPVVPVTTPGTKPDLNASFVSANAEQFYQYQPSEIILSEGRLVDSQGYGVAGVNYYTNSGRGVTGENGEFSFSWGETISFGIDTFELGSVRGNKSTIALTELGDEVRGANIDQLIHRYSTTGQNNTRVVPDDVRKVFAEYPNVINEIINLSLSNGATLGEGEQVVNLPNEFIEQFKTGQAKEIDTAICAKTDGCNEARWFSLTTRNVNDGQIQGVINKLWGVDTNYKSVSKFHVFHDSTNFYGSTGNARGQAVVNISNAAFPILMARNDKNYWLAFGEKRAWDKNDLAYITEAPSIVRPENVTRETATFNLPFISLGQVGDGKLMVIGNPHYNSILRCPNGYSWNGGVNKDGQCTLNSDPDDMKNFMENVLRYLSNDRWLPDAKSSMTVGTNLDTVYFKKHGQVLGNSAPFAFHKDFTGITVKPMTSYGNLNPDEVPLLILNGFEYVTQWGSDPYSIPLRADTSKPKLTQQDVTDLIAYMNKGGSVLIMENVMSNLKEESASGFVRLLDAAGLSMALNKSVVNNDPQGYPDRVRQRRSTPIWVYERYPAVDGKPPYTIDDTTKEVIWKYQQENKPDDKPKLEVASWQEEVEGKQVTQFAFIDEADHKTPESLAAAKQRILDAFPGLEVCKDSDYHYEVNCLEYRPGSGVPVTGGMYVPQYTQLDLGADTAKAMLQAADLGTNIQRLYQHELYFRTNGRQGERLNSVDLERLYQNMSVWLWNETKYRYEEGKEDELGFKTFTEFLNCYTNNAYVGTQCSAELKKSLIDNKMIYGEESSKAGMMNPSYPLNYMEKPLTRLMLGRSWWDLNIKVDVEKYPGAVSEEGQNVTETISLYSNPTKWFAGNMQSTGLWAPAQKEVTIKSNANVPVTVTVALADDLTGREKHEVALNRPPRVTKTYSLDASGTVKFKVPYGGLIYIKGNSSTNESASFTFTGVVKAPFYKDGAWKNDLNSPAPLGELESDAFVYTTPKKNLNASNYTGGLEQFANDLDTFASSMNDFYGRDSESGKHRMFTYKNLTGHKHRFANDVQISIGDAHSGYPVMNSSFSPNSTTLPTTPLNDWLIWHEVGHNAAETPLTVPGATEVANNVLALYMQDRYLGKMNRVADDITVAPEYLEESNGQAWARGGAGDRLLMYAQLKEWAEKNFDIKKWYPEGELPKFFSDREGMKGWNLFQLMHRKARGDDVGNKTFGGKNYCAESNGNAADSLMLCASWVAQTDLSAFFKKWNPGANAYQLPGATEMSFEGGVSQSAYSTLASLKLPKPEQGPETINKVTEHKMSLE

SEQ ID NO: 7 - protein, 1521 aa, Escherichia coli
MNKKFKYKKSLLAAILSATLLAGCDGGGSGSSSDTPPVDSGTGSLPEVKPDPTPNPEPTPEPTPDPEPTPEPTPDPEPTPEPEPEPVPTKTGYLTLGGSLRVTGDITCNDESSDGFTFTPGDKVTCVAGNNTTIATFDTQSEAARSLRAVEKVSFSLEDAQELAGSDNKKSNALSLVTSMNSCPANTEQVCLEFSSVIESKRFDSLYKQIDLAPEEFKKLVNEEVENNAATDKAPSTHTSPVVPVTTPGTKPDLNASFVSANAEQFYQYQPSEIILSEGRLVDSQGYGVAGVNYYTNSGRGVTGENGEFSFSWGETISFGIDTFELGSVRGNKSTIALTELGDEVRGANIDQLIHRYSTTGQNNTRVVPDDVRKVFAEYPNVINEIINLSLSNGATLDEGEQVVNLPNEFIEQFKTGQAKEIDTAICAKTDGCNEARWFSLTTRNVNDGQIQGVINKLWGVDTNYKSVSKFHVFHDSTNFYGSTGNARGQAVVNISNAAFPILMARNDKNYWLAFGEKRAWDKNELAYITEAPSLVEPENVTRDTATFNLPFISLGQVGEGKLMVIGNPHYNSILRCPNGYSWNGGVNKDGQCTLNSDPDDMKNFMENVLRYLSDDKWTPDAKASMTVGTNLDTVYFKRHGQVTGNSAAFDFHPDFAGISVEHLSSYGDLDPQEMPLLILNGFEYVTQVGNDPYAIPLRADTSKPKLTQQDVTDLIAYLNKGGSVLIMENVMSNLKEESASGFVRLLDAAGLSMALNKSVVNNDPQGYPNRVRQQRATGIWVYERYPAVDGALPYTIDSKTGEVKWKYQVENKPDDKPKLEVASWLEDVDGKQETRYAFIDEADHKTEDSLKAAKEKIFAAFPGLKECTNPAYHYEVNCLEYRPGTGVPVTGGMYVPQYTQLSLNADTAKAMVQAADLGTNIQRLYQHELYFRTNGRKGERLSSVDLERLYQNMSVWLWNDTSYRYEEGKNDELGFKTFTEFLNCYANDAYAGGTKCSADLKKSLVDNNMIYGDGSSKAGMMNPSYPLNYMEKPLTRLMLGRSWWDLNIKVDVEKYPGAVSEEGQNVTETISLYSNPTKWFAGNMQSTGLWAPAQKEVTIKSNANVPVTVTVALADDLTGREKHEVALNRPPRVTKTYSLDASGTVKFKVPYGGLIYIKGNSSTNESASFTFTGVVKAPFYKDGAWKNDLNSPAPLGELESDAFVYTTPKKNLNASNYTGGLEQFANDLDTFASSMNDFYGRDETSGKHRMFTYKNLTGHKHRFTNDVQISIGDAHSGYPVMNSSFSTNSTTLPTTPLNDWLIWHEVGHNAAETPLTVPGATEVANNVLALYMQDRYLGKMNRVADDITVAPEYLEESNGQAWARGGAGDRLLMYAQLKEWAEKNFDIKKWYPEGELPKFFSDREGMKGWNLFQLMHRKARGDDVGDKTFGGKNYCAESNGNAADTLMLCASWVAQTDLSAFFKKWNPGANAYQLPGATEMSFEGGVSQSAYSTLASLKLPKPEQGPETINKVTEHKMSLE

SEQ ID NO: 8 - protein, 1521 aa, Escherichia coli
MNKKFKYKKSLLAAILSATLLAGCDGGGSGSSSDTPPVDSGTGSLPEVKPDPTPNPEPTPEPTPDPEPTPEPTPDPEPTPEPEPEPVPTKTGYLTLGGSLRVTGDITCNDESSDGFTFTPGDKVTCVAGNNTTIATFDTQSEAARSLRAVEKVSFSLEDAQELAGSDNKKSNALSLVTSMNSCPANTEQVCLEFSSVIESKRFDSLYKQIDLAPEEFKKLVNEEVENNAATDKAPSTHTSPVVPATTPGTKPDLNASFVSANAEQFYQYQPTEIILSEGRLVDSQGDGVVGVNYYTNSGRGVTGENGEFSFSWGETISFGIDTFELGSVRGNKSTIALTELGDEVRGANIDQLIHRYSKAGQNHTRVVPDEVRKVFAEYPNVINEIINLSLSNGATLGEGEQVVNLPNEFIEQFKTGQAKEIDTAICAKTDGCNEARWFSLTTRNVNDGKIQGVINKLWGVDTNYKSVSKFHVFHDSTNFYGSTGNARGQAVVNISNAAFPILMARNDKNYWLAFGEKRAWDKNELAYITEAPSIVRPENVTRETATFNLPFISLGQVGDGKLMVIGNPHYNSILRCPNGYSWNGGVNKDGQCTLNSDPDDMKNFMENVLRYLSDDKWTPDAKASMTVGTNLDTVYFKRHGQVTGNSAAFDFHPDFAGISVEHLSSYGDLDPQEMPLLILNGFEYVTQVGNDPYAIPLRADTSKPKLTQQDVTDLIAYLNKGGSVLIMENVMSNLKEESASGFVRLLDAAGLSMALNKSVVNNDPQGYPNRVRQRRSTPIWVYERYPAVDGKPPYTIDDTTKEVIWKYQQENKPDDKPKLEVASWQEEVEGKQVTQFAFIDEADHKTPESLAAAKQRILDAFPGLEVCKDSDYHYEVNCLEYRPGTDVPVTGGMYVPQYTQLDLSADTAKAMLQAADLGTNIQRLYQHELYFRTNGRQGERLNSVDLERLYQNMSVWLWNETKYRYEEGKEDELGFKTFTEFLNCYTNNAYVGTQCSAELKKSLIDNKMIYGEESSKAGMMNPSYPLNYMEKPLTRLMLGRSWWDLNIKVDVEKYPGVVNTNGETVTQNINLYSAPTKWFAGNMQSTGLWAPAQQEVSIESKATVPVTVTVALADDLTGREKHEVSLNRPPRVTKTYDLKANDKVTFKVPYGGLIYIKGDSKEVQSADFTFTGVVKAPFYKDGKWQHDLNSPAPLGELESASFVYTTPKKNLNASNYTGGLEQFANDLDTFASSMNDFYGRDSEDGKHRMFTYKNLPGHKHRFANDVQISIGDAHSGYPVMNSSFSPNSTTLPTTPLNDWLIWHEVGHNAAETPLTVPGATEVANNVLALYMQDRYLGKMNRVADDITVAPEYLEESNGQAWARGGAGDRLLMYAQLKEWAEKNFDIKKWYPDGTPLPEFYSEREGMKGWNLFQLMHRKARGDEVSNDKFGGKNYCAESNGNAADTLMLCASWVAQTDLSEFFKKWNPGANAYQLPGASEMSFEGGVSQSAYNTLASLKLPKPEQGPETINKVTEHKMSVE

SEQ ID NO: 9 - protein, 1520 aa, Escherichia coli
MNKKFKYKKSLLAAILSATLLAGCDGGGSGSSSDTPSVDSGSGTLPEVKPDPTPTPEPTPEPTPDPEPTPDPTPDPDPEPTPEPEPEPVPTKTGYLTLGGSQRVTGATCNGESSDGFTFTPGNTVSCVVGSTTIATFNTQSEAARSLRAVDKVSFSLEDAQELANSENKKTNAISLVTSSDSCPADAEQLCLTFSSVVDRARFEKLYKQIDLATDNFSKLVNEEVENNAATDKAPSTHTSTVVPVTTEGTKPDLNASFVSANAEQFYQYQPTEIILSEGQLVDSLGNGVAGVDYYTNSGRGVTDENGKFSFSWGETISFGIDTFELGSVRGNKSTIALTELGDEVRGANIDQLIHRYSTTGQNNTRVVPDDVRKVFAEYPNVINEIINLSLSNGATLDEGDQNVVLPNEFIEQFKTGQAKEIDTAICAKTNGCNEARWFSLTTRNVNDGQIQGVINKLWGVDTNYQSVSKFHVFHDSTNFYGSTGNARGQAVVNISNAAFPILMARNDKNYWLAFGEKRAWDKNELAYITEAPSIVQPENVTRDTATFNLPFISLGQVGDGKLMVIGNPHYNSILRCPNGYSWGGGVNSKGECTLSGDSDDMKHFMQNVLRYLSNDIWQPNTKSIMTVGTNLENVYFKKAGQVLGNSAPFAFHEDFTGITVKQLTSYGDLNPEEIPLLILNGFEYVTQWSGDPYAVPLRADTSKPKLTQQDVTDLIAYLNKGGSVLIMENVMSNLKEESASSFVRLLDAAGLSMALNKSVVNNDPQGYPDRVRQQREKGIWVYERYPFVDGKPPYTIDETTKEVIWKYQQDNKPDDKPKLEVASWLEDVDGKQVKRYAFIDEAEHETNESLEAAKAKIIKAFPGLEECKDPTYHYEVNCLEYRPGTNVPVTGGMYVPRYTQLNLSADTAKAMVQAADLGTNIQRLYQHELYFRTNGRKGERLSSVDLERLYQNMSVWLWNEIEYSYDSSKEDELGFKTFTEFLNCYANDAYTKGTLCSAELKQSLIDNKMIYGEGSKAGMMNPSYPLNYMEKPLTRLMLGRSWWDLNIKVDVEKYPGAVSVGGEEVTETISLYSNPTKWFAGNMQSTGLWAPAQKEVTIKSNANVPVTVTVALADDLTGREKHEVALNRPPRVTKTYSLDASGTVKFKVPYGGLIYIKGNSSTNESASFTFTGVVKAPFYKDGAWKNDLNSPAPLGELESASFVYTTPKKNLNASNYTGGLDQFAKDLDTFASSMNDFYGRNDEDGKHRMFTYKNLTGHKHRFTNDVQISIGDAHSGYPVMNSSFSTNSTTLPTTPLNDWLIWHEVGHNAAETPLNVPGATEVANNVLALYMQDRYLGKMNRVADDITVAPEYLDESNGQAWARGGAGDRLLMYAQLKEWAEKNFDITKWYPDGKLPAFYSEREGMKGWNLFQLMHRKARGDDVGNSTFGGKNYCAESNGNAADTLMLCASWVAQTDLSEFFKKWNPGANAYQLPGAAEMSFEGGVSSSAYSTLASLNLPKPEKGPETINKVTEHKMSAE

SEQ ID NO: 10 - protein, 1519 aa, Escherichia coli
MNKKFKYKKSLLAAILSATLLAGCDGGGSGSSSDTPPVDSGTGSLPEVKPDPTPNPEPTPEPTPDPEPTPEPIPDPEPTPEPEPEPVPTKTGYLTLGGSQRVTGATCNGESSDGFTFKPGEDVTCVAGNTTIATFNTQSEAARSLRAVEKVSFSLEDAQELAGSDDKKSNAVSLVTSSNSCPANTEQVCLTFSSVIESKRFDSLYKQIDLAPEEFKKLVNEEVENNAATDKAPSTHTSPVVPVTTPGTKPDLNASFVSANAEQFYQYQPTEIILSEGRLVDSQGYGVAGVNYYTNSGRGVTGENGEFSFSWGEAISFGIDTFELGSVRGNKSTIALTELGDEVRGANIDQLIHRYSTTGQNNTRVVPDDVRKVFAEYPNVINEIINLSLSNGATLGEGEQVVNLPNEFIEQFNTGQAKEIDTAICAKTDGCNEARWFSLTTRNVNDGQIQGVINKLWGVDTNYKSVSKFHVFHDSTNFYGSTGNARGQAVVNISNAAFPILMARNDKNYWLAFGEKRAWDKNELAYITEAPSIVRPENVTRETASFNLPFISLGQVGDGKLMVIGNPHYNSILRCPNGYSWNGGVNKDGQCTLNSDPDDMKNFMENVLRYLSNDRWLPDAKSSMTVGTNLETVYFKKHGQVLGNSAPFAFHKDFTGITVKPMTSYGNLNPDEVPLLILNGFEYVTQWGSDPYSIPLRADTSKPKLTQQDVTDLIAYMNKGGSVLIMENVMSNLKEESASGFVRLLDAAGLSMALNKSVVNNDPQGYPDRVRQRRSTPIWVYERYPAVDGKPPYTIDDTTKEVIWKYQQENKPDDKPKLEVASWQEEVEGKQVTQFAFIDEADHKTPESLAAAKQRILDAFPGLEVCKDSDYHYEVNCLEYRPGTDVPVTGGMYVPQYTQLDLSADTAKAMLQAADLGTNIQRLYQHELYFRTNGRQGERLNSVDLERLYQNMSVWLWNETKYRYEEGKEDELGFKTFTEFLNCYTNNAYVGTQCSAELKKSLIDNKMIYGEESSKAGMMNPSYPLNYMEKPLTRLMLGRSWWDLNIKVDVEKYPGVVNTNGETVTQNINLYSAPTKWFAGNMQSTGLWAPAQQEVSIESKSTVPVTVTVALADDLTGREKHEVSLNRPPRVTKTYDLKANDKVTFKVPYGGLIYIKGDSKEVQSADFTFTGVVKAPFYKDGKWQHDLNSPAPLGELESASFVYTTPKKNLNASNYTGGLEQFANDLDTFASSMNDFYGRDSEDGKHRMFTYKNLPGHKHRFANDVQISIGDAHSGYPVMNSSFSPNSTTLPTTPLNDWLIWHEVGHNAAETPLTVPGATEVANNVLALYMQDRYLGKMNRVADDITVAPEYLEESNGQAWARGGAGDRLLMYAQLKEWAEKNFDIKKWYPDGTPLPEFYSEREGMKGWNLFQLMHRKARGDEVSNDKFGGKNYCAESNGNAADTLMLCASWVAQTDLSEFFKKWNPGANAYQLPGASEMSFEGGVSQSAYNTLASLDLPKPEQGPETINQVTEHKMSAE

SEQ ID NO: 11 - protein, 1523 aa, Escherichia coli
MNKKFKYKKSLLAAILSATLLAGCDGGGSGSSSDTPPVDSGTGSLPEVKPDPTPNPEPTPEPTPDPEPTPEPTPDPEPTPEPEPEPVPTKTGYLTLGGSQRITGATCNGESSDGFTFTPGDKVTCVAGNNTTIATFDTQSEAARSLRAVEKVSFSLEDAQELAASDDKKSNAVSLVTSSNSCPANTEQVCLTFSSVIESKRFDSLYKQIDLAPEEFKKLVNEEVENNAATDKAPSTHTSPVVPVTTPGTKPDLNASFVSANAEQFYQYQPTEIILSEGRLVDSMGNGVVGVNYYTSSGRGVTGENGKFNFSWGETISFGIDTFELGSVRGNKSTIALTELGDEVRGANIDQLIHRYSQAGKNDEREVPDVVRKVFAAYPNVINEIINLSLSNGEALSEGDQTFERTNEFLEQFESGQAKEIDTAICDSLGGCNSQRWFSLTARNVNEGQIQGVINKLWGVDKDYKSVTKFHVFHDSTNFYGSTGNARGQAVVNISNAAFPILMARNDKNYWLAFGEKRAWDKNELAYITEAPSLVEPENVTRDTATFNLPFISLGQVGEGKLMVIGNPHYNSILRCPNGYSWEGGVDKNGQCTRNSDSNDMKHFMQNVLRYLSNDKWTPDAKASMTVGTNLDTVYFKRHGQVTGNSAEFGFHPDFAGISVEHLSSYGDLDPQKMPLLILNGFEYVTQVGGDPYAVPLRADTSKPKLSQQDVTDLIAYLNKGGSVLIMENVMSNLKEESASGFVRLLDAAGLSMALNKSVVNNDPQGYPDRVRQRRATGIWVYERYPVVEGELPYTIDSKTGKVTWKYQIDNKPDKKPKLEVASWQEEVDGKQVTQFAFIDEADHKTTESLDAAKKKILEKFKGLEECKDSTYHYEINCLEYRPGTNVPATGGMYVPRYTQLNLSADTAKAMVQAADLGTNIQRLYQHELYFRTNGRKGERLSSVDLERLYQNMSVWLWNEIEYSYDSSKEDELGFKTFTEFLNCYANDAYTGGTQCSDELKKSLVDNNMIYGEKSVNKAGMMNPSYPLNYMEKPLTRLMLGRSWWDLNIKVDVEKYPGAVSEEGQEVTESISLYSNPTKWFAGNMQSTGLWAPAQKEVTIKSNADVPVTVTVALADDLTGREKHEVALNRPPKVTKTYELKANGEVKFTVPYGGLIYIKGNSKENNKSASFTFTGVVKAPFYKNGAWKNALNSPAPLGELESDAFVYTTPKKNLEASNFTGGVAEFAKDLDTFASSMNDFYGRNDEDGKHRMFTYKNLTGHKHRFTNDVQISIGDAHSGYPVMNSSFSTNSTTLPTTPLNDWLIWHEVGHNAAETPLTVPGATEVANNVLALYMQDRYLGKMNRVADDITVAPEYLEESNNQAWARGGAGDRLLMYAQLKEWAEKNFDIKKWYPDGTPLPEFYSEREGMKGWNLFQLMHRKARGDEVSNDKFGGRNYCAESNGNTADTLMLCASWVAQTDLSEFFKKWNPGANAYQLPGATEMSFEGGVSQSAYNTLASLDLPKPKQGPETINKVTEYSMPAE

SEQ ID NO: 12 - protein, 1518 aa, Escherichia coli
MNKKFKYKKSLLAAILSATLLAGCDGGGSGSSSDTPPVDSGTGSLPEVKPDPTPNPEPTPEPTPDPEPTPEPIPDPEPTPEPEPEPVPTKTGYLTLGGSQRVTGATCNGESSDGFTFKPGEDVTCVAGNTTIATFNTQSEAARSLRAVEKVSFSLEDAQELAGSDDKKSNAVSLVTSSNSCPANTEQVCLTFSSVIESKRFDSLYKQIDLAPEEFKKLVNEEVENNAATDKAPSTHTSPVVPVTTPGTKPDLNASFVSANAEQFYQYQPTEIILSEGRLVDSQGYGVAGVNYYTNSGRGVTGENGEFSFSWGETISFGIDTFELGSVRGNKSTIALTELGDEVRGANIDQLIHRYSTTGQNNTRVVPDDVRKVFAEYPNVINEIINLSLSNGATLGEGEQVVNLPNEFIEQFNTGQAKEIDTAICAKTDGCNEARWFSLTTRNVNDGQIQGVINKLWGVDTNYKSVSKFHVFHDSTNFYGSTGNARGQAVVNISNAAFPILMARNDKNYWLAFGEKRAWDKNELAYITEAPSIVRPENVTRETATFNLPFISLGQVGDGKLMVIGNPHYNSILRCPNGYSWNGGVNKDGQCTLNSDPDDMKNFMENVLRYLSNDRWLPDAKSNMTVGTNLDTVYFKKHGQVTGNSAAFGFHPDFAGISVEHLSSYGDLDPQEMPLLILNGFEYVTQVGNDPYAIPLRADTSKPKLTQQDVTDLIAYMNKGGSVLIMENVMSNLKEESASGFVRLLDAAGLSMALNKSVVNNDPQGYPDRVRQRRSTPIWVYERYPAVDGKPPYTIDDTTKEVIWKYQQENKPDDKPKLEVASWQEEVEGKQVTQFAFIDEADHKTPESLAAAKKRILDAFPGLEECKDSDYHYEVNCLEYRPGTGVPVTGGMYVPQYTQLSLNADTAKAMVQAADLGTNIQRLYQHELYFRTNGRKGERLSSVDLERLYQNMSVWLWNKIEYRYENDKDDELGFKTFTEFLNCYANNAYDGGTQCSAELKQSLIDNKMIYGEGSKAGMMNPSYPLNYMEKPLTRLMLGRSWWDLNIKVDVEKYPGAVSAEGEEVTETINLYSNPTKWFAGNMQSTGLWAPAQQEVSIKSNAKVPVTVTVALADDLTGREKHEVALNRPPRVTKTYSLDASGTVKFKVPYGGLIYIKSDSKEEKSANFTFTGVVKAPFYKDGKWKNDLKSPAPLGELESASFVYTTPKKNLEASNYKGGLKQFAEDLDTFASSMNDFYGRDGESGKHRMFTYEALTGHKHRFTNDVQISIGDAHSGYPVMNSSFSPNSTTLPTTPLNDWLIWHEVGHNAAETPLTVPGATEVANNVLALYMQDRYLGKMNRVADDITVAPEYLEESNGQAWARGGAGDRLLMYAQLKEWAEKNFDIKQWYPEGSLPAFYSEREGMKGWNLFQLMHRKARGDDVGNDKFGNRNYCAESNGNAADTLMLCASWVAQTDLSAFFKKWNPGANAYQLPGATEMSFEGGVSQSAYNTLASLDLPKPKQGPETINKVTEYSMPAE

SEQ ID NO: 13 - protein, 1520 aa, Escherichia coli
MNKKFKYKKSLLAAILSATLLAGCDGGGSGSSSDTPPVDSGTGSLPEVKPDPTPNPEPTPEPTPDPEPTPEPIPDPEPTPEPEPEPVPTKTGYLTLGGSQRVTGATCNGESSDGFTFKPGEDVTCVAGNTTIATFNTQSEAARSLRAVEKVSFSLEDAQELAGSDDKKSNAVSLVTSSNSCPANTEQVCLTFSSVIESKRFDSLYKQIDLAPEEFKKLVNEEVENNAATDKAPSTHTSPVVPVTTPGTKPDLNASFVSANAEQFYQYQPTEIILSEGRLVDSQGYGVAGVNYYTNSGRGVTGENGEFSFSWGETISFGIDTFELGSVRGNKSTIALTELGDEVRGANIDQLIHRYSTTGQNNTRVVPDDVRKVFAEYPNVINEIINLSLSNGATLGEGEQVVNLPNEFIEQFNTGQAKEIDTAICAKTDGCNEARWFSLTTRNVNDGQIQGVINKLWGVDTNYKSVSKFHVFHDSTNFYGSTGNARGQAVVNISNAAFPILMARNDKNYWLAFGEKRAWDKNELAYITEAPSLVEPENVTRDTATFNLPFISLGQVGEGKLMVIGNPHYNSILRCPNGYSWNGGVNKDGQCTLNSDPDDMKNFMENVLRYLSDDKWKPDAKASMTVGTNLDTVYFKRHGQVTGNSAAFDFHPDFAGISVEHLSSYGDLDPQEMPLLILNGFEYVTQVGNDPYAIPLRADTSKPKLTQQDVTDLIAYLNKGGSVLIMENVMSNLKEESASGFVRLLDAAGLSMALNKSVVNNDPQGYPNRVRQQRATGIWVYERYPAVDGALPYTIDSKTGEVKWKYQVENKPDDKPKLEVASWLEDVDGKQETRYAFIDEADHKTEDSLKAAKEKIFAAFPGLKECTNPAYHYEVNCLEYRPGTGVPVTGGMYVPQYTQLSLNADTAKAMVQAADLGTNIQRLYQHELYFRTNGRKGERLSSVDLERLYQNMSVWLWNDTSYRYEEGKNDELGFKTFTEFLNCYANDAYAGGTKCSADLKKSLVDNNMIYGDGSSKAGMMNPSYPLNYMEKPLTRLMLGRSWWDLNIKVDVEKYPGAVSEEGQNVTETISLYSNPTKWFAGNMQSTGLWAPAQKEVTIKSNANVPVTVTVALADDLTGREKHEVALNRPPRVTKTYSLDASGTVKFKVPYGGLIYIKGNSSTNESASFTFTGVVKAPFYKDGAWKNDLNSPAPLGELESDAFVYTTPKKNLNASNYTGGLEQFANDLDTFASSMNDFYGRDSEDGKHRMFTYKNLPGHKHRFTNDVQISIGDAHSGYPVMNSSFSPNSTTLPTTPLNDWLIWHEVGHNAAETPLTVPGATEVANNVLALYMQDRYLGKMNRVADDITVAPEYLEESNNQAWARGGAGDRLLMYAQLKEWAEKNFDIKKWYPDGTPLPEFYSEREGMKGWNLFQLMHRKARGDEVSNDKFGGKNYCAESNGNAADTLMLCASWVAQTDLSEFFKKWNPGANAYQLPGASEMSFEGGVSQSAYNTLASLDLPKPEQGPETINQVTEHKMSAE

SEQ ID NO: 14 - protein, 1518 aa, Escherichia coli
MNKKFKYKKSLLAAILSATLLAGCDGGGSGSSSDTPPVDSGTGSLPEVKPDPTPNPEPTPEPTPDPEPTPEPIPDPEPTPEPEPEPVPTKTGYLTLGGSQRVTGATCNGESSDGFTFKPGEDVTCVAGNTTIATFNTQSEAARSLRAVEKVSFSLEDAQELAGSDDKKSNAVSLVTSSNSCPANTEQVCLTFSSVIESKRFDSLYKQIDLAPEEFKKLVNEEVENNAATDKAPSTHTSPVVPVTTPGTKPDLNASFVSANAEQFYQYQPTEIILSEGRLVDSQGYGVAGVNYYTNSGRGVTGENGEFSFSWGETISFGIDTFELGSVRGNKSTIALTELGDEVRGANIDQLIHRYSTTGQNNTRVVPEDVRKVFAEYPNVINEIINLSLSNGATLGEGEQVVNLPNEFIEQFNTGQAKEIDTAICAKTDGCNEARWFSLTTRNVNDGQIQGVINKLWGVDTNYKSVSKFHVFHDSTNFYGSTGNARGQAVVNISNAAFPILMARNDKNYWLAFGEKRAWDKNELAYITEAPSIVRPENVTRETATFNLPFISLGQVGDGKLMVIGNPHYNSILRCPNGYSWNGGVNKDGQCTLNSDPDDMKNFMENVLRYLSNDRWLPDAKSNMTVGTNLDTVYFKKHGQVTGNSAAFGFHPDFAGISVEHLSSYGDLDPQEMPLLILNGFEYVTQVGNDPYAIPLRADTSKPKLTQQDVTDLIAYMNKGGSVLIMENVMSNLKEESASGFVRLLDAAGLSMALNKSVVNNDPQGYPDRVRQRRSTPIWVYERYPAVDGKPPYTIDDTTKEVIWKYQQENKPDDKPKLEVASWQEEVEGKQVTQFAFIDEADHKTPESLAAAKKRILDAFPGLEECKDSDYHYEVNCLEYRPGTGVPVTGGMYVPQYTQLSLNADTAKAMVQAADLGTNIQRLYQHELYFRTNGRKGERLSSVDLERLYQNMSVWLWNKIEYRYENDKDDELGFKTFTEFLNCYANNAYDGGTQCSAELKQSLIDNKMIYGEGSKAGMMNPSYPLNYMEKPLTRLMLGRSWWDLNIKVDVEKYPGAVSAEGEEVTETINLYSNPTKWFAGNMQSTGLWAPAQQEVSIKSNAKVPVTVTVALADDLTGREKHEVALNRPPRVTKTYSLDASGTVKFKVPYGGLIYIKSDSKEEKSANFTFTGVVKAPFYKDGKWKNDLKSPAPLGELESASFVYTTPKKNLEASNYKGGLKQFAEDLDTFASSMNDFYGRDGESGKHRMFTYEALTGHKHRFTNDVQISIGDAHSGYPVMNSSFSPNSTTLPTTPLNDWLIWHEVGHNAAETPLTVPGATEVANNVLALYMQDRYLGKMNRVADDITVAPEYLEESNGQAWARGGAGDRLLMYAQLKEWAEKNFDIKQWYPEGSLPAFYSEREGMKGWNLFQLMHRKARGDDVGNDKFGNRNYCAESNGNAADTLMLCASWVAQTDLSAFFKKWNPGANAYQLPGATEMSFEGGVSQSAYNTLASLDLPKPEQGPETINQVTEHKMSAE

SEQ ID NO: 15 - protein, 1524 aa, Escherichia coli
MNKKFKYKKSLLAAILSATLLAGCDGGGSGPSSDTPPVDSGTGSLPEVKPDPTPNPEPTPEPTPDPEPTPDPTPDPEPTPEPEPEPVPTKTGYLTLGGSQRITGATCNGESSDGFTFTPGDKVTCVAGNNTTIATFDTQSEAARSLRAVEKVSFSLEDAQELAASDDKKSNAVSLVTSSNSCPADTEQVCLTFSSVIESKRFDSLYKQIDLAPEEFKKLVNEEVENNAATDKAPSTHTSPVVPVTTPGTKPDLNASFVSANAEQFYQYQPTEIILSEGRLVDSQGYGVAGVNYYTNSGRGVTGENGEFSFSWGETISFGIDTFELGSVRGNKSTIALTELGDEVRGANIDQLIHRYSTTGQNNTRVVPDDVRKVFAEYPNVINEIINLSLSNGATLDEGDQNVVLPNEFIEQFKTGQAKEIDTAICAKTDGCNEARWFSLTTRNVNDGQIQGVINKLWGVDKDYKSVTKFHVFHDSTNFYGSTGNARGQAVVNISNAAFPILMARNDKNYWLAFGEKRAWDKNELAYITEAPSIVQPENVTRDTATFNLPFISLGQVGEGKLMVIGNPHYNSILRCPNGYSWNGGVNKDGQCTLSGDSDDMKHFMQNVLRYLSDDKWTPDAKASMTVGTNLDTVYFKRHGQVTGNSAEFGFHPDFAGISVEHLSSYGDLDPQEMPLLILNGFEYVTQVGNDPYAIPLRADTSKPKLTQQDVTDLIAYLNKGGSVLIMENVMSNLKEESASGFVRLLDAAGLSMALNKSVVNTDPQGYPNRVRQQREKGIWVYERYPAVDSAQPPYTIDPDTGKVTWKYQEEGKPDDKPKLEVASWQEDVDGKQVTRYAFIDEAEHSTEESLEAAKAKIFEKFPGLQECKDSTYHYEINCLERRPGTDVPVTGGMYVPRYTQLNLDADTAKAMVQAADLGTNIQRLYQHELYFRTNGRKGERLSSVDLERLYQNMSVWLWNKIEYRYENDKDDELGFKTFTEFLNCYANNAYSEGTQCSADLKKSLVDNNMIYGDGSSKAGMMNPSYPLNYMEKPLTRLMLGRSWWDLNIKVDVEKYPGAVSAEGEKVTETISLYSNPTKWFAGNMQSTGLWAPAQQEVTIESTASVPVTVTVALADDLTGREKHEVALNRPPKVTKTYDLKANDKVTFKVPYGGLIYIKGNSPKNESAEFTFTGVVKAPFYKDGEWKNALNSPAPLGELESDSFVYTAPKNNLNASNYSNYTDGVAEFAKELDTFASSMNDFYGRDGESGNHRMFTYKALTGHKHRFANDVQISIGDAHSGYPVMNSSFSTNSTTLPTTPLNDWLIWHEVGHNAAETPLNVPGATEVANNVLALYMQDRYLGKMNRVADDITVAPEYLDESNGQAWARGGAGDRLLMYAQLKEWAEENFDIKQWYPDGELPKFYSDRKGMKGWNLFQLMHRKARGDDVSNDKFGGRNYCAESNGNAADTLMLCASWVAQADLSEFFKKWNPGANAYQLPGASEMSFEGGVSQSAYNTLAAMHLSKPEKGPETINKVTEYSMPAE

SEQ ID NO: 16 - protein, 1521 aa, Escherichia coli
MNKKFKYKKSLLAAILSATLLAGCDGGGSGSSSDTPPVDSGTGSLPEVKPDPTPNPEPTPEPTPDPEPTPEPTPDPEPTPEPEPEPVPTKTGYLTLGGSLRVTGDITCNDESSDGFTFTPGDKVTCVAGNNTTIATFDTQSEAARSLRAVEKVSFSLEDAQELAGSDNKKSNALSLVTSMNSCPANTEQVCLEFSSVIESKRFDSLYKQIDLAPEEFKKLVNEEVENNAATDKAPSTHTSPVVPATTPGTKPDLNASFVSANAEQFYQYQPTEIILSEGRLVDSQGDGVVGVNYYTNSGRGVTGENGEFSFSWGETISFGIDTFELGSVRGNKSTIALTELGDEVRGANIDQLIHRYSKAGQNHTRVVPDEVRKVFAEYPNVINEIINLSLSNGATLGEGEQVVNLPNEFIEQFKTGQAKEIDTAICAKTDGCNEARWFSLTTRNVNDGQIQGVINKLWGVDTNYKSVSKFHVFHDSTNFYGSTGNARGQAVVNISNAAFPILMARNDKNYWLAFGEKRAWDKNELAYITEAPSIVRPENVTRETATFNLPFISLGQVGDGKLMVIGNPHYNSILRCPNGYSWNGGVNKDGQCTLNSDPDDMKNFMENVLRYLSNDRWLPDAKSSMTVGTNLDTVYFKKHGQVLGNSAPFAFHKDFTGITVKPMTSYGNLNPDEVPLLILNGFEYVTQWGSDPYSIPLRADTSKPKLTQQDVTDLIAYMNKGGSVLIMENVMSNLKEESASGFVRLLDAAGLSMALNKSVVNNDPQGYPDRVRQRRSTPIWVYERYPAVDGKPPYTIDDTTKEVIWKYQQENKPDDKPKLEVASWQEEVEGKQVTQFAFIDEADHKTPESLAAAKQRILDAFPGLEVCKDSDYHYEVNCLEYRPGTGVPVTGGMYVPQYTQLDLGADTAKAMLQAADLGTNIQRLYQHELYFRTNGLQGERLNSVDLERLYQNMSVWLWNETKYRYEEGKEDELGFKTFTEFLNCYTNNAYVGTQCSAELKKSLIDNKMIYGEESSKAGMMNPSYPLNYMEKPLTRLMLGRSWWDLNIKVDVEKYPGVVNTNGETVTQNINLYSAPTKWFAGNMQSTGLWAPAQQEVSIESKATVPVTVTVALADDLTGREKHEVSLNRPPRVTKTYDLKANDKVTFKVPYGGLIYIKGDSKEVQSADFTFTGVVKAPFYKDGKWQHDLNSPAPLGELESASFVYTTPKKNLNASNYTGGLEQFANDLDTFASSMNDFYGRDSEDGKHRMFTYKNLPGHKHRFANDVQISIGDAHSGYPVMNSSFSPNSTTLPTTPLNDWLIWHEVGHNAAETPLTVPGATEVANNVLALYMQDRYLGKMNRVADDITVAPEYLEESNGQAWARGGAGDRLLMYAQLKEWAEKNFDIKKWYPDGTPLPEFYSEREGMKGWNLFQLMHRKARGDEVSNDKFGGKNYCAESNGNAADTLMLCASWVAQTDLSEFFKKWNPGANAYQLPGATEMSFEGGVSQSAYNTLASLNLPKPKQGPETINKVTEYSMPAE

SEQ ID NO: 17 - protein, 1518 aa, Escherichia coli
MNKKFKYKKSLLAAILSATLLAGCDGGGSGSSSDTPPVDSGTGSLPEVKPDPTPNPEPTPEPTPDPEPTPEPTPDPEPEPEPEPVPTKTGYLTLGGSQRVTGATCNGESSDGFTFTPGEDVTCVAGNTTIATFDTQSEAARSLRAVEKVSFSLEDAQELAASDDKKSNAVSLVTSSNSCPANTEQVCLTFSSVIESKRFDSLYKQIDLAPEEFKKLVNEEVENNAATDKAPSTHTSPVVPVTTPGTKPDLNASFVSANAEQFYQYQPTEIILSEGRLVDSMGNGVVGVNYYTSSGRGVTGENGKFNFSWGETISFGIDTFELGSVRGNKSTIALTELGDEVRGANIDQLIHRYSQAGKNDEREVPDVVRKVFAEYPNVINEIINLSLSNGEALSEGDQTFERTNEFLEQFESGQAKEIDTAICDSLGGCNSQRWFSLTARNVNEGQIQGVINKLWGVDKDYKSVTKFHVFHDSTNFYGSTGNARGQAVVNISNAAFPILMARNDKNYWLAFGEKRAWDKNELAYITEAPSLVEPENVTRDTATFNLPFISLGQVGEGKLMVIGNPHYNSILRCPNGYSWEGGVDKNGQCTRNSDSNDMKHFMQNVLRYLSDDKWTPDAKASMTVGTNLDTVYFKRHGQVTGNSAEFGFHPDFAGISVEHLSSYGDLDPQEMPLLILNGFEYVTQVGNDPYAIPLRADTSKPKLTQQDVTDLIAYLNKGGSVLIMENVMSNLKEESASGFVRLLDAAGLSMALNKSVVNNDPQGYPNRVRQQRATGIWVYERYPAVDGALPYTIDSKTGEVKWKYQVENKPDDKPKLEVASWLEDVDGKQETRYAFIDEADHKTEDSLKAAKAKIFEKFPGLKECKDPTYHYEVNCLEYRPGTGVPVTGGMYVPQYTQLSLNADTAKAMVQAADLGTNIQRLYQHELYFRTNGRKGERLSSVDLERLYQNMSVWLWNKIEYRYENDKDDELGFKTFTEFLNCYANDAYTGGTQCSDELKKSLVDNNMIYGEKSVNKAGMMNPSYPLNYMEKPLTRLMLGRSWWDLNIKVDVEKYPGAVSAEGEKVTETISLYSNPTKWFAGNMQSTGLWAPAQKEVTIESSASVPVTVTVALADDLTGREKHEVALNRPPKVTKTYDLKANDKVTFKVPYGGLIYIKGNSPKNESAEFTFTGVVKAPFYKDGEWKNALNSPAPLGELESDAFVYTTPKKNLEASNFTGGVAEFAKDLDTFASSMNDFYGRNDEDGKHRMFTYKNLTGHKHRFTNDVQISIGDAHSGYPVMNSSFSTNSTTLPTTPLNDWLIWHEVGHNAAETPLTVPGATEVANNVLALYMQDRYLGKMNRVADDITVAPEYLEESNGQAWARGGAGDRLLMYAQLKEWAEKNFDIKQWYPEGDLPKFYSDREGMKGWNLFQLMHRKARGDDVGKTKFGERNYCAESNGNAADKLMLCASWVAQTDLSEFFKKWNPGANAYQLPGASEMNFEGGVSQSAYETLAALNLPKPQQGPETINQVTEHKMSAE

SEQ ID NO: 18 - protein, 1520 aa, Escherichia coli
MNKKFKYKKSLLAAILSATLLAGCDGGGSGSSSDTPPVDSGTGSLPEVKPDPTPNPEPTPEPTPDPEPTPEPIPDPEPTPEPEPEPVPTKTGYLTLGGSQRVTGATCNGESSDGFTFTPGEDVTCVAGNTTIATFNTQSEAARSLRAVEKVSFSLEDAQELAASDNKKSNAVSLVTSSNSCPADTEQVCLTFSSVIESKRFDSLYKQIDLAPEEFKKLVNEEVENNAATDKAPSTHTSPVVPVTTPGTKPDLNASFVSANAEQFYQYQPTEIILSEGRLVDSQGYGVAGVNYYTNSGRGVTGENGEFSFSWGETISFGIDTFELGSVRGNKSTIALTELGDEVRGANIDQLIHRYSTTGQNNTRVVPDDVRKVFAEYPNVINEIINLSLSNGATLDEGEQVVNLPNEFIEQFKTGQAKEIDTAICAKTDGCNEARWFSLTTRNVNDGQIQGVINKLWGVDTSYKSVSKFHVFHDSTNFYGSTGNARGQAVVNISNAAFPILMARNDKNYWLAFGEKRAWDKNELAYITEAPSIVRPENVTRETATFNLPFISLGQVGKGKLMVIGNPHYNSILRCPNGYSWEGGVDKNGQCTRNSDSNDMKHFMQNVLRYLSNDKWTPDAKASMTVGTNLDTVYFKRHGQVTGNSAEFGFHPDFAGISVEHLSSYGDLDPQKMPLLILNGFEYVTQVGGDPYAVPLRADTSKPKLTQQDVTDLIAYMNKGGSVLIMENVMSNLKEESASGFVRLLDAAGLSMALNKSVVNNDPQGYPDRVRQRRATGIWVYERYPVVEGELPYTIDSKTGKVTWKYQIDNKPDKKPKLEVASWQEEVDGKQVTQFAFIDEADHKTTESLDAAKKKILEKFKGLEECKDSTYHYEINCLEYRPGTNVPVTGGMYVPRYTQLNLSADTAKAMVQAADLGTNIQRLYQHELYFRTNGRKGERLSSVDLERLYQNMSVWLWNEIEYSYDSSKEDELGFKTFTEFLNCYANDAYTGGTQCSDELKKSLVDNNMIYGEKSVNKAGMMNPSYPLNYMEKPLTRLMLGRSWWDLNIKVDVEKYPGAVSAEGEKVTETISLYSNPTKWFAGNMQSTGLWAPAQKEVTIESSASVPVTVTVALADDLTGREKHEVALNRPPKVTKTYDLKANDKVTFKVPYGGLIYIKGNSPKNESAEFTFTGVVKAPFYKDGEWKNALNSPAPLGELESDAFVYTTPKKNLEASNFTGGVAEFAKDLDTFASSMNDFYGRNDEDGKHRMFTYKNLTGHKHRFTNDVQISIGDAHSGYPVMNSSFSTNSTTLPTTPLNDWLIWHEVGHNAAETPLTVPGATEVANNVLALYMQDRYLGKMNRVADDITVAPEYLEESNGQAWARGGAGDRLLMYAQLKEWAEKNFDIKTWYPDGNLPAFYSEREGMKGWNLFQLMHRKARGDEVGKTKFGERNYCAESNGNAADTLMLCASWVAQTDLSEFFKKWNPGANAYQLPGASEMNFEGGVSQSAYETLAALNLPKPQQGPETINQVTEHKMSAE

SEQ ID NO: 19 - protein, 1520 aa, Escherichia coli; identical to SEQ ID NO: 1

SEQ ID NO: 20 - protein, 738 aa, Escherichia coli
CDGGGSGSSSDTPSVDSGSGTLPEVKPDPTPTPEPTPEPTPDPEPTPDPTPDPEPTPEPEPEPVPTKTGYLTLGGSQRVTGATCNGESSDGFTFTPGNTVSCVVGSTTIATFNTQSEAARSLRAVDKVSFSLEDAQELANSENKKTNAISLVTSSDSCPADAEQLCLTFSSVVDRARFEKLYKQIDLATDNFSKLVNEEVENNAATDKAPSTHTSTVVPVTTEGTKPDLNASFVSANAEQFYQYQPTEIILSEGQLVDSLGNGVAGVDYYTNSGRGVTDENGKFSFSWGETISFGIDTFELGSVRGNKSTIALTELGDEVRGANIDQLIHRYSTTGQNNTRVVPDDVRKVFAEYPNVINEIINLSLSNGATLDEGDQNVVLPNEFIEQFKTGQAKEIDTAICAKTDGCNEARWFSLTTRNVNDGQIQGVINKLWGVDTNYQSVSKFHVFHDSTNFYGSTGNARGQAVVNISNSAFPILMARNDKNYWLAFGEKRAWDKNELAYITEAPSIVQPENVTRDTATFNLPFISLGQVGEGKLMVIGNPHYNSILRCPNGYSWGGGVNSKGECTLSGDSDDMKHFMQNVLRYLSNDIWQPNTKSIMTVGTNLENVYFKKAGQVLGNSAPFAFHEDFTGITVKQLTSYGDLNPEEIPLLILNGFEYVTQWSGDPYAVPLRADTSKPKLTQQDVTDLIAYLNKGGSVLIMENVMSNLKEESASSFVRLLDAAGLSMALNKSVVNN

SEQ ID NO: 21 - protein, 739 aa, Escherichia coli
CDGGGSGSSSDTPPVDSGTGSLPEVKPDPTPNPEPTPEPTPDPEPTPEPTPDPEPTPEPEPEPVPTKTGYLTLGGSQRITGATCNGESSDGFTFTPGDKVTCVAGNNTTIATFDTQSEAARSLRAVEKVSFSLEDAQELAASDDKKSNAVSLVTSSNSCPANTEQVCLTFSSVIESKRFDSLYKQIDLAPEEFKKLVNEEVENNAATDKAPSTHTSPVVPVTTPGTKPDLNASFVSANAEQFYQYQPTEIILSEGRLVDSMGNGVVGVNYYTSSGRGVTGENGKFNFSWGETISFGIDTFELGSVRGNKSTIALTELGDEVRGANIDQLIHRYSQAGKNDEREVPDVVRKVFAEYPNVINEIINLSLSNGEALSEGDQTFERTNEFLEQFESGQAKEIDTAICDSLGGCNSQRWFSLTARNVNEGQIQGVINKLWGVDKDYKSVTKFHVFHDSTNFYGSTGNARGQAVVNISNAAFPILMARNDKNYWLAFGEKRAWDKNELAYITEAPSLVEPENVTRDTATFNLPFISLGQVGEGKLMVIGNPHYNSILRCPNGYSWEGGVDKNGQCTRNSDSNDMKHFMQNVLRYLSDDKWTPDAKASMTVGTNLDTVYFKRHGQVTGNSAEFGFHPDFAGISVEHLSSYGDLDPQEMPLLILNGFEYVTQVGNDPYAIPLRADTSKPKLTQQDVTDLIAYLNKGGSVLIMENVMSNLKEESASGFVRLLDAAGLSMALNKSVVNN

SEQ ID NO: 22 - protein, 739 aa, Escherichia coli
CDGGGSGSSSDTPPVDSGTGSLPEVKPDPTPNPEPTPEPTPDPEPTPEPTPDPEPTPEPEPEPVPTKTGYLTLGGSQRITGATCNGESSDGFTFTPGDKVTCVAGNNTTIATFDTQSEAARSLRAVEKVSFSLEDAQELAASDDKKSNAVSLVTSSNSCPADTEQVCLTFSSVIESKRFDSLYKQIDLAPEEFKKLVNEEVENNAATDKAPSTHTSPVVPVTTPGTKPDLNASFVSANAEQFYQYQPTEIILSEGRLVDSMGNGVVGVNYYTSSGRGVTGENGKFNFSWGETISFGIDTFELGSVRGNKSTIALTELGDEVRGANIDQLIHRYSQAGKNDEREVPDVVRKVFAEYPNVINEIINLSLSNGEALSEGDQTFERTNEFLEQFESGQAKEIDTAICDSLGGCNSQRWFSLTARNVNDGQIQGVINKLWGVDTNYKSVSKFHVFHDSTNFYGSTGNARGQAVVNISNAAFPILMARNDKNYWLAFGEKRAWDKNELAYITEAPSLVEPENVTRDTATFNLPFISLGQVGEGKLMVIGNPHYNSILRCPNGYSWEGGVDKNGQCTRNSDSNDMKHFMQNVLRYLSDDKWTPDAKASMTVGTNLDTVYFKRHGQVTGNSAEFGFHPDFAGISVEHLSSYGDLDPQEMPLLILNGFEYVTQVGNDPYAIPLRADTSKPKLTQQDVTDLIAYLNKGGSVLIMENVMSNLKEESASGFVRLLDAAGLSMALNKSVVNN

SEQ ID NO: 23 - protein, 738 aa, Escherichia coli
CDGGGSGSSSDTPPVDSGTGSLPEVKPDPTPNPEPTPEPTPDPEPTPEPIPDPEPTPEPEPEPVPTKTGYLTLGGSQRVTGATCNGESSDGFTFKPGEDVTCVAGNTTIATFNTQSEAARSLRAVEKVSFSLEDAQELAGSDDKKSNAVSLVTSSNSCPANTEQVCLTFSSVIESKRFDSLYKQIDLAPEEFKKLVNEEVENNAATDKAPSTHTSPVVPVTTPGTKPDLNASFVSANAEQFYQYQPTEIILSEGRLVDSQGYGVAGVNYYTNSGRGVTGENGEFSFSWGETISFGIDTFELGSVRGNKSTIALTELGDEVRGANIDQLIHRYSTTGQNNTRVVPDDVRKVFAEYPNVINEIINLSLSNGATLGEGEQVVNLPNEFIEQFNTGQAKEIDTAICAKTDGCNEARWFSLTTRNVNDGQIQGVINKLWGVDTNYKSVSKFHVFHDSTNFYGSTGNARGQAVVNISNAAFPILMARNDKNYWLAFGEKRAWDKNELAYITEAPSLVEPENVTRDTATFNLPFISLGQVGEGKLMVIGNPHYNSILRCPNGYSWNGGVNKDGQCTLNSDPDDMKNFMENVLRYLSDDKWKPDAKASMTVGTNLDTVYFKRHGQVTGNSAAFDFHPDFAGISVEHLSSYGDLDPQEMPLLILNGFEYVTQVGNDPYAIPLRADTSKPKLTQQDVTDLIAYLNKGGSVLIMENVMSNLKEESASGFVRLLDAAGLSMALNKSVVNN

SEQ ID NO: 24 - protein, 740 aa, Escherichia coli
CDGGGSGSSSDTPPVDSGTGSLPEVKPDPTPNPEPTPEPTPDPEPTPEPTPDPEPTPEPEPEPVPTKTGYLTLGGSLRVTGDITCNDESSDGFTFTPGDKVTCVAGNNTTIATFDTQSEAARSLRAVEKVSFSLEDAQELAGSDNKKSNALSLVTSMNSCPANTEQVCLEFSSVIESKRFDSLYKQIDLAPEEFKKLVNEEVENNAATDKAPSTHTSPVVPVTTPGTKPDLNASFVSANAEQFYQYQPSEIILSEGRLVDSQGYGVAGVNYYTNSGRGVTGENGEFSFSWGETISFGIDTFELGSVRGNKSTIALTELGDEVRGANIDQLIHRYSTTGQNNTRVVPDDVRKVFAEYPNVINEIINLSLSNGATLDEGEQVVNLPNEFIEQFKTGQAKEIDTAICAKTDGCNEARWFSLTTRNVNDGQIQGVINKLWGVDTNYKSVSKFHVFHDSTNFYGSTGNARGQAVVNISNAAFPILMARNDKNYWLAFGEKRAWDKNELAYITEAPSLVEPENVTRDTATFNLPFISLGQVGEGKLMVIGNPHYNSILRCPNGYSWNGGVNKDGQCTLNSDPDDMKNFMENVLRYLSDDKWTPDAKASMTVGTNLDTVYFKRHGQVTGNSAAFDFHPDFAGISVEHLSSYGDLDPQEMPLLILNGFEYVTQVGNDPYAIPLRADTSKPKLTQQDVTDLIAYLNKGGSVLIMENVMSNLKEESASGFVRLLDAAGLSMALNKSVVNN

SEQ ID NO: 25 - protein, 740 aa, Escherichia coli
CDGGGSGSSSDTPPVDSGTGSLPEVKPDPTPNPEPTPEPTPDPEPTPEPTPDPEPTPEPEPEPVPTKTGYLTLGGSLRVTGDITCNDESSDGFTFTPGDKVTCVAGNNTTIATFDTQSEAARSLRAVEKVSFSLEDAQELAGSDNKKSNALSLVTSMNSCPANTEQVCLEFSSVIESKRFDSLYKQIDLAPEEFKKLVNEEVENNAATDKAPSTHTSPVVPVTTPGTKPDLNASFVSANAEQFYQYQPSEIILSEGRLVDSQGYGVAGVNYYTNSGRGVTGENGEFSFSWGETISFGIDTFELGSVRGNKSTIALTELGDEVRGANIDQLIHRYSTTGQNNTRVVPDDVRKVFAEYPNVINEIINLSLSNGATLGEGEQVVNLPNEFIEQFKTGQAKEIDTAICAKTDGCNEARWFSLTTRNVNDGQIQGVINKLWGVDTNYKSVSKFHVFHDSTNFYGSTGNARGQAVVNISNAAFPILMARNDKNYWLAFGEKRAWDKNDLAYITEAPSIVRPENVTRETATFNLPFISLGQVGDGKLMVIGNPHYNSILRCPNGYSWNGGVNKDGQCTLNSDPDDMKNFMENVLRYLSNDRWLPDAKSSMTVGTNLDTVYFKKHGQVLGNSAPFAFHKDFTGITVKPMTSYGNLNPDEVPLLILNGFEYVTQWGSDPYSIPLRADTSKPKLTQQDVTDLIAYMNKGGSVLIMENVMSNLKEESASGFVRLLDAAGLSMALNKSVVNN

SEQ ID NO: 26 - protein, 740 aa, Escherichia coli; identical to SEQ ID NO: 24

SEQ ID NO: 27 - protein, 740 aa, Escherichia coli
CDGGGSGSSSDTPPVDSGTGSLPEVKPDPTPNPEPTPEPTPDPEPTPEPTPDPEPTPEPEPEPVPTKTGYLTLGGSLRVTGDITCNDESSDGFTFTPGDKVTCVAGNNTTIATFDTQSEAARSLRAVEKVSFSLEDAQELAGSDNKKSNALSLVTSMNSCPANTEQVCLEFSSVIESKRFDSLYKQIDLAPEEFKKLVNEEVENNAATDKAPSTHTSPVVPATTPGTKPDLNASFVSANAEQFYQYQPTEIILSEGRLVDSQGDGVVGVNYYTNSGRGVTGENGEFSFSWGETISFGIDTFELGSVRGNKSTIALTELGDEVRGANIDQLIHRYSKAGQNHTRVVPDEVRKVFAEYPNVINEIINLSLSNGATLGEGEQVVNLPNEFIEQFKTGQAKEIDTAICAKTDGCNEARWFSLTTRNVNDGKIQGVINKLWGVDTNYKSVSKFHVFHDSTNFYGSTGNARGQAVVNISNAAFPILMARNDKNYWLAFGEKRAWDKNELAYITEAPSIVRPENVTRETATFNLPFISLGQVGDGKLMVIGNPHYNSILRCPNGYSWNGGVNKDGQCTLNSDPDDMKNFMENVLRYLSDDKWTPDAKASMTVGTNLDTVYFKRHGQVTGNSAAFDFHPDFAGISVEHLSSYGDLDPQEMPLLILNGFEYVTQVGNDPYAIPLRADTSKPKLTQQDVTDLIAYLNKGGSVLIMENVMSNLKEESASGFVRLLDAAGLSMALNKSVVNN

SEQ ID NO: 28 - protein, 740 aa, Escherichia coli
CDGGGSGSSSDTPSVDSGSGTLPEVKPDPTPTPEPTPEPTPDPEPTPDPTPDPDPEPTPEPEPEPVPTKTGYLTLGGSQRVTGATCNGESSDGFTFTPGNTVSCVVGSTTIATFNTQSEAARSLRAVDKVSFSLEDAQELANSENKKTNAISLVTSSDSCPADAEQLCLTFSSVVDRARFEKLYKQIDLATDNFSKLVNEEVENNAATDKAPSTHTSTVVPVTTEGTKPDLNASFVSANAEQFYQYQPTEIILSEGQLVDSLGNGVAGVDYYTNSGRGVTDENGKFSFSWGETISFGIDTFELGSVRGNKSTIALTELGDEVRGANIDQLIHRYSTTGQNNTRVVPDDVRKVFAEYPNVINEIINLSLSNGATLDEGDQNVVLPNEFIEQFKTGQAKEIDTAICAKTNGCNEARWFSLTTRNVNDGQIQGVINKLWGVDTNYQSVSKFHVFHDSTNFYGSTGNARGQAVVNISNAAFPILMARNDKNYWLAFGEKRAWDKNELAYITEAPSIVQPENVTRDTATFNLPFISLGQVGDGKLMVIGNPHYNSILRCPNGYSWGGGVNSKGECTLSGDSDDMKHFMQNVLRYLSNDIWQPNTKSIMTVGTNLENVYFKKAGQVLGNSAPFAFHEDFTGITVKQLTSYGDLNPEEIPLLILNGFEYVTQWSGDPYAVPLRADTSKPKLTQQDVTDLIAYLNKGGSVLIMENVMSNLKEESASSFVRLLDAAGLSMALNKSVVNN

SEQ ID NO: 29 - protein, 738 aa, Escherichia coli
CDGGGSGSSSDTPPVDSGTGSLPEVKPDPTPNPEPTPEPTPDPEPTPEPIPDPEPTPEPEPEPVPTKTGYLTLGGSQRVTGATCNGESSDGFTFKPGEDVTCVAGNTTIATFNTQSEAARSLRAVEKVSFSLEDAQELAGSDDKKSNAVSLVTSSNSCPANTEQVCLTFSSVIESKRFDSLYKQIDLAPEEFKKLVNEEVENNAATDKAPSTHTSPVVPVTTPGTKPDLNASFVSANAEQFYQYQPTEIILSEGRLVDSQGYGVAGVNYYTNSGRGVTGENGEFSFSWGEAISFGIDTFELGSVRGNKSTIALTELGDEVRGANIDQLIHRYSTTGQNNTRVVPDDVRKVFAEYPNVINEIINLSLSNGATLGEGEQVVNLPNEFIEQFNTGQAKEIDTAICAKTDGCNEARWFSLTTRNVNDGQIQGVINKLWGVDTNYKSVSKFHVFHDSTNFYGSTGNARGQAVVNISNAAFPILMARNDKNYWLAFGEKRAWDKNELAYITEAPSIVRPENVTRETASFNLPFISLGQVGDGKLMVIGNPHYNSILRCPNGYSWNGGVNKDGQCTLNSDPDDMKNFMENVLRYLSNDRWLPDAKSSMTVGTNLETVYFKKHGQVLGNSAPFAFHKDFTGITVKPMTSYGNLNPDEVPLLILNGFEYVTQWGSDPYSIPLRADTSKPKLTQQDVTDLIAYMNKGGSVLIMENVMSNLKEESASGFVRLLDAAGLSMALNKSVVNN

SEQ ID NO: 30 - protein, 739 aa, Escherichia coli
CDGGGSGSSSDTPPVDSGTGSLPEVKPDPTPNPEPTPEPTPDPEPTPEPTPDPEPTPEPEPEPVPTKTGYLTLGGSQRITGATCNGESSDGFTFTPGDKVTCVAGNNTTIATFDTQSEAARSLRAVEKVSFSLEDAQELAASDDKKSNAVSLVTSSNSCPANTEQVCLTFSSVIESKRFDSLYKQIDLAPEEFKKLVNEEVENNAATDKAPSTHTSPVVPVTTPGTKPDLNASFVSANAEQFYQYQPTEIILSEGRLVDSMGNGVVGVNYYTSSGRGVTGENGKFNFSWGETISFGIDTFELGSVRGNKSTIALTELGDEVRGANIDQLIHRYSQAGKNDEREVPDVVRKVFAAYPNVINEIINLSLSNGEALSEGDQTFERTNEFLEQFESGQAKEIDTAICDSLGGCNSQRWFSLTARNVNEGQIQGVINKLWGVDKDYKSVTKFHVFHDSTNFYGSTGNARGQAVVNISNAAFPILMARNDKNYWLAFGEKRAWDKNELAYITEAPSLVEPENVTRDTATFNLPFISLGQVGEGKLMVIGNPHYNSILRCPNGYSWEGGVDKNGQCTRNSDSNDMKHFMQNVLRYLSNDKWTPDAKASMTVGTNLDTVYFKRHGQVTGNSAEFGFHPDFAGISVEHLSSYGDLDPQKMPLLILNGFEYVTQVGGDPYAVPLRADTSKPKLSQQDVTDLIAYLNKGGSVLIMENVMSNLKEESASGFVRLLDAAGLSMALNKSVVNN

SEQ ID NO: 31 - protein, 738 aa, Escherichia coli
CDGGGSGSSSDTPPVDSGTGSLPEVKPDPTPNPEPTPEPTPDPEPTPEPIPDPEPTPEPEPEPVPTKTGYLTLGGSQRVTGATCNGESSDGFTFKPGEDVTCVAGNTTIATFNTQSEAARSLRAVEKVSFSLEDAQELAGSDDKKSNAVSLVTSSNSCPANTEQVCLTFSSVIESKRFDSLYKQIDLAPEEFKKLVNEEVENNAATDKAPSTHTSPVVPVTTPGTKPDLNASFVSANAEQFYQYQPTEIILSEGRLVDSQGYGVAGVNYYTNSGRGVTGENGEFSFSWGETISFGIDTFELGSVRGNKSTIALTELGDEVRGANIDQLIHRYSTTGQNNTRVVPDDVRKVFAEYPNVINEIINLSLSNGATLGEGEQVVNLPNEFIEQFNTGQAKEIDTAICAKTDGCNEARWFSLTTRNVNDGQIQGVINKLWGVDTNYKSVSKFHVFHDSTNFYGSTGNARGQAVVNISNAAFPILMARNDKNYWLAFGEKRAWDKNELAYITEAPSIVRPENVTRETATFNLPFISLGQVGDGKLMVIGNPHYNSILRCPNGYSWNGGVNKDGQCTLNSDPDDMKNFMENVLRYLSNDRWLPDAKSNMTVGTNLDTVYFKKHGQVTGNSAAFGFHPDFAGISVEHLSSYGDLDPQEMPLLILNGFEYVTQVGNDPYAIPLRADTSKPKLTQQDVTDLIAYMNKGGSVLIMENVMSNLKEESASGFVRLLDAAGLSMALNKSVVNN

SEQ ID NO: 32 - protein, 738 aa, Escherichia coli; identical to SEQ ID NO: 23

SEQ ID NO: 33 - protein, 738 aa, Escherichia coli
CDGGGSGSSSDTPPVDSGTGSLPEVKPDPTPNPEPTPEPTPDPEPTPEPIPDPEPTPEPEPEPVPTKTGYLTLGGSQRVTGATCNGESSDGFTFKPGEDVTCVAGNTTIATFNTQSEAARSLRAVEKVSFSLEDAQELAGSDDKKSNAVSLVTSSNSCPANTEQVCLTFSSVIESKRFDSLYKQIDLAPEEFKKLVNEEVENNAATDKAPSTHTSPVVPVTTPGTKPDLNASFVSANAEQFYQYQPTEIILSEGRLVDSQGYGVAGVNYYTNSGRGVTGENGEFSFSWGETISFGIDTFELGSVRGNKSTIALTELGDEVRGANIDQLIHRYSTTGQNNTRVVPEDVRKVFAEYPNVINEIINLSLSNGATLGEGEQVVNLPNEFIEQFNTGQAKEIDTAICAKTDGCNEARWFSLTTRNVNDGQIQGVINKLWGVDTNYKSVSKFHVFHDSTNFYGSTGNARGQAVVNISNAAFPILMARNDKNYWLAFGEKRAWDKNELAYITEAPSIVRPENVTRETATFNLPFISLGQVGDGKLMVIGNPHYNSILRCPNGYSWNGGVNKDGQCTLNSDPDDMKNFMENVLRYLSNDRWLPDAKSNMTVGTNLDTVYFKKHGQVTGNSAAFGFHPDFAGISVEHLSSYGDLDPQEMPLLILNGFEYVTQVGNDPYAIPLRADTSKPKLTQQDVTDLIAYMNKGGSVLIMENVMSNLKEESASGFVRLLDAAGLSMALNKSVVNN

SEQ ID NO: 34 - protein, 739 aa, Escherichia coli
CDGGGSGPSSDTPPVDSGTGSLPEVKPDPTPNPEPTPEPTPDPEPTPDPTPDPEPTPEPEPEPVPTKTGYLTLGGSQRITGATCNGESSDGFTFTPGDKVTCVAGNNTTIATFDTQSEAARSLRAVEKVSFSLEDAQELAASDDKKSNAVSLVTSSNSCPADTEQVCLTFSSVIESKRFDSLYKQIDLAPEEFKKLVNEEVENNAATDKAPSTHTSPVVPVTTPGTKPDLNASFVSANAEQFYQYQPTEIILSEGRLVDSQGYGVAGVNYYTNSGRGVTGENGEFSFSWGETISFGIDTFELGSVRGNKSTIALTELGDEVRGANIDQLIHRYSTTGQNNTRVVPDDVRKVFAEYPNVINEIINLSLSNGATLDEGDQNVVLPNEFIEQFKTGQAKEIDTAICAKTDGCNEARWFSLTTRNVNDGQIQGVINKLWGVDKDYKSVTKFHVFHDSTNFYGSTGNARGQAVVNISNAAFPILMARNDKNYWLAFGEKRAWDKNELAYITEAPSIVQPENVTRDTATFNLPFISLGQVGEGKLMVIGNPHYNSILRCPNGYSWNGGVNKDGQCTLSGDSDDMKHFMQNVLRYLSDDKWTPDAKASMTVGTNLDTVYFKRHGQVTGNSAEFGFHPDFAGISVEHLSSYGDLDPQEMPLLILNGFEYVTQVGNDPYAIPLRADTSKPKLTQQDVTDLIAYLNKGGSVLIMENVMSNLKEESASGFVRLLDAAGLSMALNKSVVNT

SEQ ID NO: 35 - protein, 740 aa, Escherichia coli
CDGGGSGSSSDTPPVDSGTGSLPEVKPDPTPNPEPTPEPTPDPEPTPEPTPDPEPTPEPEPEPVPTKTGYLTLGGSLRVTGDITCNDESSDGFTFTPGDKVTCVAGNNTTIATFDTQSEAARSLRAVEKVSFSLEDAQELAGSDNKKSNALSLVTSMNSCPANTEQVCLEFSSVIESKRFDSLYKQIDLAPEEFKKLVNEEVENNAATDKAPSTHTSPVVPATTPGTKPDLNASFVSANAEQFYQYQPTEIILSEGRLVDSQGDGVVGVNYYTNSGRGVTGENGEFSFSWGETISFGIDTFELGSVRGNKSTIALTELGDEVRGANIDQLIHRYSKAGQNHTRVVPDEVRKVFAEYPNVINEIINLSLSNGATLGEGEQVVNLPNEFIEQFKTGQAKEIDTAICAKTDGCNEARWFSLTTRNVNDGQIQGVINKLWGVDTNYKSVSKFHVFHDSTNFYGSTGNARGQAVVNISNAAFPILMARNDKNYWLAFGEKRAWDKNELAYITEAPSIVRPENVTRETATFNLPFISLGQVGDGKLMVIGNPHYNSILRCPNGYSWNGGVNKDGQCTLNSDPDDMKNFMENVLRYLSNDRWLPDAKSSMTVGTNLDTVYFKKHGQVLGNSAPFAFHKDFTGITVKPMTSYGNLNPDEVPLLILNGFEYVTQWGSDPYSIPLRADTSKPKLTQQDVTDLIAYMNKGGSVLIMENVMSNLKEESASGFVRLLDAAGLSMALNKSVVNN

SEQ ID NO: 36 - protein, 736 aa, Escherichia coli
CDGGGSGSSSDTPPVDSGTGSLPEVKPDPTPNPEPTPEPTPDPEPTPEPTPDPEPEPEPEPVPTKTGYLTLGGSQRVTGATCNGESSDGFTFTPGEDVTCVAGNTTIATFDTQSEAARSLRAVEKVSFSLEDAQELAASDDKKSNAVSLVTSSNSCPANTEQVCLTFSSVIESKRFDSLYKQIDLAPEEFKKLVNEEVENNAATDKAPSTHTSPVVPVTTPGTKPDLNASFVSANAEQFYQYQPTEIILSEGRLVDSMGNGVVGVNYYTSSGRGVTGENGKFNFSWGETISFGIDTFELGSVRGNKSTIALTELGDEVRGANIDQLIHRYSQAGKNDEREVPDVVRKVFAEYPNVINEIINLSLSNGEALSEGDQTFERTNEFLEQFESGQAKEIDTAICDSLGGCNSQRWFSLTARNVNEGQIQGVINKLWGVDKDYKSVTKFHVFHDSTNFYGSTGNARGQAVVNISNAAFPILMARNDKNYWLAFGEKRAWDKNELAYITEAPSLVEPENVTRDTATFNLPFISLGQVGEGKLMVIGNPHYNSILRCPNGYSWEGGVDKNGQCTRNSDSNDMKHFMQNVLRYLSDDKWTPDAKASMTVGTNLDTVYFKRHGQVTGNSAEFGFHPDFAGISVEHLSSYGDLDPQEMPLLILNGFEYVTQVGNDPYAIPLRADTSKPKLTQQDVTDLIAYLNKGGSVLIMENVMSNLKEESASGFVRLLDAAGLSMALNKSVVNN

SEQ ID NO: 37 - protein, 738 aa, Escherichia coli
CDGGGSGSSSDTPPVDSGTGSLPEVKPDPTPNPEPTPEPTPDPEPTPEPIPDPEPTPEPEPEPVPTKTGYLTLGGSQRVTGATCNGESSDGFTFTPGEDVTCVAGNTTIATFNTQSEAARSLRAVEKVSFSLEDAQELAASDNKKSNAVSLVTSSNSCPADTEQVCLTFSSVIESKRFDSLYKQIDLAPEEFKKLVNEEVENNAATDKAPSTHTSPVVPVTTPGTKPDLNASFVSANAEQFYQYQPTEIILSEGRLVDSQGYGVAGVNYYTNSGRGVTGENGEFSFSWGETISFGIDTFELGSVRGNKSTIALTELGDEVRGANIDQLIHRYSTTGQNNTRVVPDDVRKVFAEYPNVINEIINLSLSNGATLDEGEQVVNLPNEFIEQFKTGQAKEIDTAICAKTDGCNEARWFSLTTRNVNDGQIQGVINKLWGVDTSYKSVSKFHVFHDSTNFYGSTGNARGQAVVNISNAAFPILMARNDKNYWLAFGEKRAWDKNELAYITEAPSIVRPENVTRETATFNLPFISLGQVGKGKLMVIGNPHYNSILRCPNGYSWEGGVDKNGQCTRNSDSNDMKHFMQNVLRYLSNDKWTPDAKASMTVGTNLDTVYFKRHGQVTGNSAEFGFHPDFAGISVEHLSSYGDLDPQKMPLLILNGFEYVTQVGGDPYAVPLRADTSKPKLTQQDVTDLIAYMNKGGSVLIMENVMSNLKEESASGFVRLLDAAGLSMALNKSVVNN

SEQ ID NO: 38 - protein, 738 aa, Escherichia coli; identical to SEQ ID NO: 20

SEQ ID NO: 39 - protein, 759 aa, Escherichia coli
DPQGYPDRVRQRRATGIWVYERYPAADGAQPPYTIDPNTGEVTWKYQQDNKPDDKPKLEVASWQEEVEGKQVTRYAFIDEAEYTTEESLEAAKAKIFEKFPGLQECKDSTYHYEINCLERRPGTDVPVTGGMYVPRYTQLNLDADTAKAMVQAADLGTNIQRLYQHELYFRTKGSKGERLNSVDLERLYQNMSVWLWNDTKYRYEEGKEDELGFKTFTEFLNCYANDAYAGGTKCSADLKKSLVDNNMIYGDGSSKAGMMNPSYPLNYMEKPLTRLMLGRSWWDLNIKVDVEKYPGSVSAKGESVTENISLYSNPTKWFAGNMQSTGLWAPAQQDVTIKSSASVPVTVTVALADDLTGREKHEVALNRPPRVTKTYTLEANGEVTFKVPYGGLIYIKGDSKDDVSANFTFTGVVKAPFYKDGEWKNDLDSPAPLGELESASFVYTTPKKNLEASNFTGGVAEFAKDLDTFASSMNDFYGRNDEDGKHRMFTYKNLTGHKHRFTNDVQISIGDAHSGYPVMNSSFSTNSTTLPTTPLNDWLIWHEVGHNAAETPLNVPGATEVANNVLALYMQDRYLGKMNRVADDITVAPEYLDESNGQAWARGGAGDRLLMYAQLKEWAEENFDIKQWYPDGELPKFYSDRKGMKGWNLFQLMHRKARGDDVGNSTFGGKNYCAESNGNAADTLMLCASWVAQADLSEFFKKWNPGASAYQLPGATEMSFQGGVSSSAYSTLASLKLPKPEKGPETINKVTEHKMSAE

SEQ ID NO: 40 - protein, 759 aa, Escherichia coli
DPQGYPNRVRQQRATGIWVYERYPAVDGALPYTIDSKTGEVKWKYQVENKPDDKPKLEVASWLEDVDGKQETRYAFIDEADHKTEDSLKAAKAKIFEKFPGLKECKDPTYHYEVNCLEYRPGTGVPVTGGMYVPQYTQLSLNADTAKAMVQAADLGTNIQRLYQHELYFRTNGRKGERLSSVDLERLYQNMSVWLWNKIEYRYENDKDDELGFKTFTEFLNCYANDAYTGGTQCSDELKKSLVDNNMIYGEKSVNKAGMMNPSYPLNYMEKPLTRLMLGRSWWDLNIKVDVEKYPGAVSAEGEKVTETISLYSNPTKWFAGNMQSTGLWAPAQKEVTIESSASVPVTVTVALADDLTGREKHEVALNRPPKVTKTYELKANGEVKFTVPYGGLIYIKGNSPQNESAEFTFTGVVKAPFYKDGAWKNALNSPAPLGELESDAFVYTTPKKNLEASNFTGGVAEFAKDLDTFASSMNDFYGRNDEDGKHRMFTYKNLTGHKHRFTNDVQISIGDAHSGYPVMNSSFSTNSTTLPTTPLNDWLIWHEVGHNAAETPLTVPGATEVANNVLALYMQDRYLGKMNRVADDITVAPEYLEESNGQAWARGGAGDRLLMYAQLKEWAEKNFDIKQWYPEGDLPKFYSDREGMKGWNLFQLMHRKARGDEVGKTKFGERNYCAESNGNAADKLMLCASWVAQTDLSEFFKKWNPGANAYQLPGASEMNFEGGVSQSAYETLAALNLPKPQQGPETINQVTEHKMSAE

SEQ ID NO: 41 - protein, 759 aa, Escherichia coli
DPQGYPNRVRQQRATGIWVYERYPAVDGALPYTIDSKTGEVKWKYQVENKPDDKPKLEVASWLEDVDGKQETRYAFIDEADHKTEDSLKAAKAKIFEKFPGLKECKDPTYHYEVNCLEYRPGTGVPVTGGMYVPQYTQLSLNADTAKAMVQAADLGTNIQRLYQHELYFRTNGRKGERLSSVDLERLYQNMSVWLWNKIEYRYENDKDDELGFKTFTEFLNCYANDAYTGGTQCSDELKKSLVDNNMIYGEKSVNKAGMMNPSYPLNYMEKPLTRLMLGRSWWDLNIKVDVEKYPGAVSAEGEKVTETISLYSNPTKWFAGNMQSTGLWAPAQKEVTIESTASVAVTVTVALADDLTGREKHEVALNRPPKVTKTYELKANGEVKFTVPYGGLIYIKGNSPQNESAEFTFTGVVKAPFYKDGAWKNALNSPAPLGELESDAFVYTTPKKNLEASNYKGGQEQFAEELDTFASSMNDFYGRNDEDGKHRMFTYKNLTGHKHRFTNDVQISIGDAHSGYPVMNSSFSTNSTTLPTTPLNDWLIWHEAGHNAAETPLTVPGATEVANNVLALYMQDRYLGKMNRVADDITVAPEYLEESNNQAWARGGAGDRLLMYAQLKEWAEKNFDITKWYPEGNLPKFYSEREGMKGWNLFQLMHRKARGDEVGKTKFGERNYCAESNGNAADTLMLCASWVAQTDLSAFFKKWNPGANAYQLPGASEMNFEGGVSQSAYETLAALNLPKPQQGPETINKVTEYSMPAE

SEQ ID NO: 42 - protein, 759 aa, Escherichia coli
DPQGYPNRVRQQRATGIWVYERYPAVDGALPYTIDSKTGEVKWKYQVENKPDDKPKLEVASWLEDVDGKQETRYAFIDEADHKTEDSLKAAKEKIFAAFPGLKECTNPAYHYEVNCLEYRPGTGVPVTGGMYVPQYTQLSLNADTAKAMVQAADLGTNIQRLYQHELYFRTNGRKGERLSSVDLERLYQNMSVWLWNDTSYRYEEGKNDELGFKTFTEFLNCYANDAYAGGTKCSADLKKSLVDNNMIYGDGSSKAGMMNPSYPLNYMEKPLTRLMLGRSWWDLNIKVDVEKYPGAVSEEGQNVTETISLYSNPTKWFAGNMQSTGLWAPAQKEVTIKSNANVPVTVTVALADDLTGREKHEVALNRPPRVTKTYSLDASGTVKFKVPYGGLIYIKGNSSTNESASFTFTGVVKAPFYKDGAWKNDLNSPAPLGELESDAFVYTTPKKNLNASNYTGGLEQFANDLDTFASSMNDFHGRDSEDGKHRMFTYKNLPGHKHRFTNDVQISIGDAHSGYPVMNSSFSPNSTTLPTTPLNDWLIWHEVGHNAAETPLTVPGATEVANNVLALYMQDRYLGKMNRVADDITVAPEYLEESNNQAWARGGAGDRLLMYAQLKEWAEKNFDIKKWYPDGTPLPEFYSEREGMKGWNLFQLMHRKARGDEVSNDKFGGKNYCAESNGNAADTLMLCASWVAQTDLSEFFKKWNPGANAYQLPGASEMSFEGGVSQSAYNTLASLDLPKPEQGPETINQVTEHKMSAE

SEQ ID NO: 43 - protein, 759 aa, Escherichia coli
DPQGYPNRVRQQRATGIWVYERYPAVDGALPYTIDSKTGEVKWKYQVENKPDDKPKLEVASWLEDVDGKQETRYAFIDEADHKTEDSLKAAKEKIFAAFPGLKECTNPAYHYEVNCLEYRPGTGVPVTGGMYVPQYTQLSLNADTAKAMVQAADLGTNIQRLYQHELYFRTNGRKGERLSCVDLERLYQNMSVWLWNDTSYRYEEGKNDELGFKTFTEFLNCYANDAYAGGTKCSADLKKSLVDNNMIYGDGSSKAGMMNPSYPLNYMEKPLTRLMLGRSWWDLNIKVDVEKYPGAVSEEGQNVTETISLYSNPTKWFAGNMQSTGLWAPAQKEVTIKSNANVPVTVTVALADDLTGREKHEVALNRPPRVTKTYSLDASGTVKFKVPYGGLIYIKGNSSTNESASFTFTGVVKAPFYKDGAWKNDLNSPAPLGELESDAFVYTTPKKNLNASNYTGGLEQFANDLDTFASSMNDFYGRDSEDGKHRMFTYKNLPGHKHRFANDVQISIGDAHSGYPVMNSSFSPNSTTLPTTPLNDWLIWHEVGHNAAETPLTVPGATEVANNVLALYMQDRYLGKMNRVADDITVAPEYLEESNGQAWARGGAGDRLLMYAQLKEWAEKNFDIKKWYPDGTPLPEFYSEREGMKGWNLFQLMHRKARGDEVSNDKFGGKNYCAESNGNAADTLMLCASWVAQTDLSEFFKKWNPGANAYQLPGASEMSFEGGVSQSAYNTLASLKLPKPEQGPETINKVTEHKMSVE

SEQ ID NO: 44 - protein, 757 aa, Escherichia coli
DPQGYPDRVRQRRSTPIWVYERYPAVDGKPPYTIDDTTKEVIWKYQQENKPDDKPKLEVASWQEEVEGKQVTQFAFIDEADHKTPESLAAAKQRILDAFPGLEVCKDSDYHYEVNCLEYRPGSGVPVTGGMYVPQYTQLDLGADTAKAMLQAADLGTNIQRLYQHELYFRTNGRQGERLNSVDLERLYQNMSVWLWNETKYRYEEGKEDELGFKTFTEFLNCYTNNAYVGTQCSAELKKSLIDNKMIYGEESSKAGMMNPSYPLNYMEKPLTRLMLGRSWWDLNIKVDVEKYPGAVSEEGQNVTETISLYSNPTKWFAGNMQSTGLWAPAQKEVTIKSNANVPVTVTVALADDLTGREKHEVALNRPPRVTKTYSLDASGTVKFKVPYGGLIYIKGNSSTNESASFTFTGVVKAPFYKDGAWKNDLNSPAPLGELESDAFVYTTPKKNLNASNYTGGLEQFANDLDTFASSMNDFYGRDSESGKHRMFTYKNLTGHKHRFANDVQISIGDAHSGYPVMNSSFSPNSTTLPTTPLNDWLIWHEVGHNAAETPLTVPGATEVANNVLALYMQDRYLGKMNRVADDITVAPEYLEESNGQAWARGGAGDRLLMYAQLKEWAEKNFDIKKWYPEGELPKFFSDREGMKGWNLFQLMHRKARGDDVGNKTFGGKNYCAESNGNAADSLMLCASWVAQTDLSAFFKKWNPGANAYQLPGATEMSFEGGVSQSAYSTLASLKLPKPEQGPETINKVTEHKMSLE

SEQ ID NO: 45 - protein, 758 aa, Escherichia coli
DPQGYPNRVRQQRATGIWVYERYPAVDGALPYTIDSKTGEVKWKYQVENKPDDKPKLEVASWLEDVDGKQETRYAFIDEADHKTEDSLKAAKEKIFAAFPGLKECTNPAYHYEVNCLEYRPGTGVPVTGGMYVPQYTQLSLNADTAKAMVQAADLGTNIQRLYQHELYFRTNGRKGERLSSVDLERLYQNMSVWLWNDTSYRYEEGKNDELGFKTFTEFLNCYANDAYAGGTKCSADLKKSLVDNNMIYGDGSSKAGMMNPSYPLNYMEKPLTRLMLGRSWWDLNIKVDVEKYPGAVSEEGQNVTETISLYSNPTKWFAGNMQSTGLWAPAQKEVTIKSNANVPVTVTVALADDLTGREKHEVALNRPPRVTKTYSLDASGTVKFKVPYGGLIYIKGNSSTNESASFTFTGVVKAPFYKDGAWKNDLNSPAPLGELESDAFVYTTPKKNLNASNYTGGLEQFANDLDTFASSMNDFYGRDETSGKHRMFTYKNLTGHKHRFTNDVQISIGDAHSGYPVMNSSFSTNSTTLPTTPLNDWLIWHEVGHNAAETPLTVPGATEVANNVLALYMQDRYLGKMNRVADDITVAPEYLEESNGQAWARGGAGDRLLMYAQLKEWAEKNFDIKKWYPEGELPKFFSDREGMKGWNLFQLMHRKARGDDVGDKTFGGKNYCAESNGNAADTLMLCASWVAQTDLSAFFKKWNPGANAYQLPGATEMSFEGGVSQSAYSTLASLKLPKPEQGPETINKVTEHKMSLE

SEQ ID NO: 46 - protein, 758 aa, Escherichia coli
DPQGYPNRVRQRRSTPIWVYERYPAVDGKPPYTIDDTTKEVIWKYQQENKPDDKPKLEVASWQEEVEGKQVTQFAFIDEADHKTPESLAAAKQRILDAFPGLEVCKDSDYHYEVNCLEYRPGTDVPVTGGMYVPQYTQLDLSADTAKAMLQAADLGTNIQRLYQHELYFRTNGRQGERLNSVDLERLYQNMSVWLWNETKYRYEEGKEDELGFKTFTEFLNCYTNNAYVGTQCSAELKKSLIDNKMIYGEESSKAGMMNPSYPLNYMEKPLTRLMLGRSWWDLNIKVDVEKYPGVVNTNGETVTQNINLYSAPTKWFAGNMQSTGLWAPAQQEVSIESKATVPVTVTVALADDLTGREKHEVSLNRPPRVTKTYDLKANDKVTFKVPYGGLIYIKGDSKEVQSADFTFTGVVKAPFYKDGKWQHDLNSPAPLGELESASFVYTTPKKNLNASNYTGGLEQFANDLDTFASSMNDFYGRDSEDGKHRMFTYKNLPGHKHRFANDVQISIGDAHSGYPVMNSSFSPNSTTLPTTPLNDWLIWHEVGHNAAETPLTVPGATEVANNVLALYMQDRYLGKMNRVADDITVAPEYLEESNGQAWARGGAGDRLLMYAQLKEWAEKNFDIKKWYPDGTPLPEFYSEREGMKGWNLFQLMHRKARGDEVSNDKFGGKNYCAESNGNAADTLMLCASWVAQTDLSEFFKKWNPGANAYQLPGASEMSFEGGVSQSAYNTLASLKLPKPEQGPETINKVTEHKMSVE

SEQ ID NO: 47 - protein, 757 aa, Escherichia coli
DPQGYPDRVRQQREKGIWVYERYPFVDGKPPYTIDETTKEVIWKYQQDNKPDDKPKLEVASWLEDVDGKQVKRYAFIDEAEHETNESLEAAKAKIIKAFPGLEECKDPTYHYEVNCLEYRPGTNVPVTGGMYVPRYTQLNLSADTAKAMVQAADLGTNIQRLYQHELYFRTNGRKGERLSSVDLERLYQNMSVWLWNEIEYSYDSSKEDELGFKTFTEFLNCYANDAYTKGTLCSAELKQSLIDNKMIYGEGSKAGMMNPSYPLNYMEKPLTRLMLGRSWWDLNIKVDVEKYPGAVSVGGEEVTETISLYSNPTKWFAGNMQSTGLWAPAQKEVTIKSNANVPVTVTVALADDLTGREKHEVALNRPPRVTKTYSLDASGTVKFKVPYGGLIYIKGNSSTNESASFTFTGVVKAPFYKDGAWKNDLNSPAPLGELESASFVYTTPKKNLNASNYTGGLDQFAKDLDTFASSMNDFYGRNDEDGKHRMFTYKNLTGHKHRFTNDVQISIGDAHSGYPVMNSSFSTNSTTLPTTPLNDWLIWHEVGHNAAETPLNVPGATEVANNVLALYMQDRYLGKMNRVADDITVAPEYLDESNGQAWARGGAGDRLLMYAQLKEWAEKNFDITKWYPDGKLPAFYSEREGMKGWNLFQLMHRKARGDDVGNSTFGGKNYCAESNGNAADTLMLCASWVAQTDLSEFFKKWNPGANAYQLPGAAEMSFEGGVSSSAYSTLASLNLPKPEKGPETINKVTEHKMSAE

SEQ ID NO: 48 - protein, 758 aa, Escherichia coli
DPQGYPDRVRQRRSTPIWVYERYPAVDGKPPYTIDDTTKEVIWKYQQENKPDDKPKLEVASWQEEVEGKQVTQFAFIDEADHKTPESLAAAKQRILDAFPGLEVCKDSDYHYEVNCLEYRPGTDVPVTGGMYVPQYTQLDLSADTAKAMLQAADLGTNIQRLYQHELYFRTNGRQGERLNSVDLERLYQNMSVWLWNETKYRYEEGKEDELGFKTFTEFLNCYTNNAYVGTQCSAELKKSLIDNKMIYGEESSKAGMMNPSYPLNYMEKPLTRLMLGRSWWDLNIKVDVEKYPGVVNTNGETVTQNINLYSAPTKWFAGNMQSTGLWAPAQQEVSIESKSTVPVTVTVALADDLTGREKHEVSLNRPPRVTKTYDLKANDKVTFKVPYGGLIYIKGDSKEVQSADFTFTGVVKAPFYKDGKWQHDLNSPAPLGELESASFVYTTPKKNLNASNYTGGLEQFANDLDTFASSMNDFYGRDSEDGKHRMFTYKNLPGHKHRFANDVQISIGDAHSGYPVMNSSFSPNSTTLPTTPLNDWLIWHEVGHNAAETPLTVPGATEVANNVLALYMQDRYLGKMNRVADDITVAPEYLEESNGQAWARGGAGDRLLMYAQLKEWAEKNFDIKKWYPDGTPLPEFYSEREGMKGWNLFQLMHRKARGDEVSNDKFGGKNYCAESNGNAADTLMLCASWVAQTDLSEFFKKWNPGANAYQLPGASEMSFEGGVSQSAYNTLASLDLPKPEQGPETINQVTEHKMSAE

SEQ ID NO: 49 - protein, 761 aa, Escherichia coli
DPQGYPDRVRQRRATGIWVYERYPVVEGELPYTIDSKTGKVTWKYQIDNKPDKKPKLEVASWQEEVDGKQVTQFAFIDEADHKTTESLDAAKKKILEKFKGLEECKDSTYHYEINCLEYRPGTNVPATGGMYVPRYTQLNLSADTAKAMVQAADLGTNIQRLYQHELYFRTNGRKGERLSSVDLERLYQNMSVWLWNEIEYSYDSSKEDELGFKTFTEFLNCYANDAYTGGTQCSDELKKSLVDNNMIYGEKSVNKAGMMNPSYPLNYMEKPLTRLMLGRSWWDLNIKVDVEKYPGAVSEEGQEVTESISLYSNPTKWFAGNMQSTGLWAPAQKEVTIKSNADVPVTVTVALADDLTGREKHEVALNRPPKVTKTYELKANGEVKFTVPYGGLIYIKGNSKENNKSASFTFTGVVKAPFYKNGAWKNALNSPAPLGELESDAFVYTTPKKNLEASNFTGGVAEFAKDLDTFASSMNDFYGRNDEDGKHRMFTYKNLTGHKHRFTNDVQISIGDAHSGYPVMNSSFSTNSTTLPTTPLNDWLIWHEVGHNAAETPLTVPGATEVANNVLALYMQDRYLGKMNRVADDITVAPEYLEESNNQAWARGGAGDRLLMYAQLKEWAEKNFDIKKWYPDGTPLPEFYSEREGMKGWNLFQLMHRKARGDEVSNDKFGGRNYCAESNGNTADTLMLCASWVAQTDLSEFFKKWNPGANAYQLPGATEMSFEGGVSQSAYNTLASLDLPKPKQGPETINKVTEYSMPAE

SEQ ID NO: 50 - protein, 757 aa, Escherichia coli
DPQGYPDRVRQRRSTPIWVYERYPAVDGKPPYTIDDTTKEVIWKYQQENKPDDKPKLEVASWQEEVEGKQVTQFAFIDEADHKTPESLAAAKKRILDAFPGLEECKDSDYHYEVNCLEYRPGTGVPVTGGMYVPQYTQLSLNADTAKAMVQAADLGTNIQRLYQHELYFRTNGRKGERLSSVDLERLYQNMSVWLWNKIEYRYENDKDDELGFKTFTEFLNCYANNAYDGGTQCSAELKQSLIDNKMIYGEGSKAGMMNPSYPLNYMEKPLTRLMLGRSWWDLNIKVDVEKYPGAVSAEGEEVTETINLYSNPTKWFAGNMQSTGLWAPAQQEVSIKSNAKVPVTVTVALADDLTGREKHEVALNRPPRVTKTYSLDASGTVKFKVPYGGLIYIKSDSKEEKSANFTFTGVVKAPFYKDGKWKNDLKSPAPLGELESASFVYTTPKKNLEASNYKGGLKQFAEDLDTFASSMNDFYGRDGESGKHRMFTYEALTGHKHRFTNDVQISIGDAHSGYPVMNSSFSPNSTTLPTTPLNDWLIWHEVGHNAAETPLTVPGATEVANNVLALYMQDRYLGKMNRVADDITVAPEYLEESNGQAWARGGAGDRLLMYAQLKEWAEKNFDIKQWYPEGSLPAFYSEREGMKGWNLFQLMHRKARGDDVGNDKFGNRNYCAESNGNAADTLMLCASWVAQTDLSAFFKKWNPGANAYQLPGATEMSFEGGVSQSAYNTLASLDLPKPKQGPETINKVTEYSMPAE

SEQ ID NO: 51 - protein, 759 aa, Escherichia coli
DPQGYPNRVRQQRATGIWVYERYPAVDGALPYTIDSKTGEVKWKYQVENKPDDKPKLEVASWLEDVDGKQETRYAFIDEADHKTEDSLKAAKEKIFAAFPGLKECTNPAYHYEVNCLEYRPGTGVPVTGGMYVPQYTQLSLNADTAKAMVQAADLGTNIQRLYQHELYFRTNGRKGERLSSVDLERLYQNMSVWLWNDTSYRYEEGKNDELGFKTFTEFLNCYANDAYAGGTKCSADLKKSLVDNNMIYGDGSSKAGMMNPSYPLNYMEKPLTRLMLGRSWWDLNIKVDVEKYPGAVSEEGQNVTETISLYSNPTKWFAGNMQSTGLWAPAQKEVTIKSNANVPVTVTVALADDLTGREKHEVALNRPPRVTKTYSLDASGTVKFKVPYGGLIYIKGNSSTNESASFTFTGVVKAPFYKDGAWKNDLNSPAPLGELESDAFVYTTPKKNLNASNYTGGLEQFANDLDTFASSMNDFYGRDSEDGKHRMFTYKNLPGHKHRFTNDVQISIGDAHSGYPVMNSSFSPNSTTLPTTPLNDWLIWHEVGHNAAETPLTVPGATEVANNVLALYMQDRYLGKMNRVADDITVAPEYLEESNNQAWARGGAGDRLLMYAQLKEWAEKNFDIKKWYPDGTPLPEFYSEREGMKGWNLFQLMHRKARGDEVSNDKFGGKNYCAESNGNAADTLMLCASWVAQTDLSEFFKKWNPGANAYQLPGASEMSFEGGVSQSAYNTLASLDLPKPEQGPETINQVTEHKMSAE

SEQ ID NO: 52 - protein, 757 aa, Escherichia coli
DPQGYPDRVRQRRSTPIWVYERYPAVDGKPPYTIDDTTKEVIWKYQQENKPDDKPKLEVASWQEEVEGKQVTQFAFIDEADHKTPESLAAAKKRILDAFPGLEECKDSDYHYEVNCLEYRPGTGVPVTGGMYVPQYTQLSLNADTAKAMVQAADLGTNIQRLYQHELYFRTNGRKGERLSSVDLERLYQNMSVWLWNKIEYRYENDKDDELGFKTFTEFLNCYANNAYDGGTQCSAELKQSLIDNKMIYGEGSKAGMMNPSYPLNYMEKPLTRLMLGRSWWDLNIKVDVEKYPGAVSAEGEEVTETINLYSNPTKWFAGNMQSTGLWAPAQQEVSIKSNAKVPVTVTVALADDLTGREKHEVALNRPPRVTKTYSLDASGTVKFKVPYGGLIYIKSDSKEEKSANFTFTGVVKAPFYKDGKWKNDLKSPAPLGELESASFVYTTPKKNLEASNYKGGLKQFAEDLDTFASSMNDFYGRDGESGKHRMFTYEALTGHKHRFTNDVQISIGDAHSGYPVMNSSFSPNSTTLPTTPLNDWLIWHEVGHNAAETPLTVPGATEVANNVLALYMQDRYLGKMNRVADDITVAPEYLEESNGQAWARGGAGDRLLMYAQLKEWAEKNFDIKQWYPEGSLPAFYSEREGMKGWNLFQLMHRKARGDDVGNDKFGNRNYCAESNGNAADTLMLCASWVAQTDLSAFFKKWNPGANAYQLPGATEMSFEGGVSQSAYNTLASLDLPKPEQGPETINQVTEHKMSAE

SEQ ID NO: 53 - protein, 762 aa, Escherichia coli
DPQGYPNRVRQQREKGIWVYERYPAVDSAQPPYTIDPDTGKVTWKYQEEGKPDDKPKLEVASWQEDVDGKQVTRYAFIDEAEHSTEESLEAAKAKIFEKFPGLQECKDSTYHYEINCLERRPGTDVPVTGGMYVPRYTQLNLDADTAKAMVQAADLGTNIQRLYQHELYFRTNGRKGERLSSVDLERLYQNMSVWLWNKIEYRYENDKDDELGFKTFTEFLNCYANNAYSEGTQCSADLKKSLVDNNMIYGDGSSKAGMMNPSYPLNYMEKPLTRLMLGRSWWDLNIKVDVEKYPGAVSAEGEKVTETISLYSNPTKWFAGNMQSTGLWAPAQQEVTIESTASVPVTVTVALADDLTGREKHEVALNRPPKVTKTYDLKANDKVTFKVPYGGLIYIKGNSPKNESAEFTFTGVVKAPFYKDGEWKNALNSPAPLGELESDSFVYTAPKNNLNASNYSNYTDGVAEFAKELDTFASSMNDFYGRDGESGNHRMFTYKALTGHKHRFANDVQISIGDAHSGYPVMNSSFSTNSTTLPTTPLNDWLIWHEVGHNAAETPLNVPGATEVANNVLALYMQDRYLGKMNRVADDITVAPEYLDESNGQAWARGGAGDRLLMYAQLKEWAEENFDIKQWYPDGELPKFYSDRKGMKGWNLFQLMHRKARGDDVSNDKFGGRNYCAESNGNAADTLMLCASWVAQADLSEFFKKWNPGANAYQLPGASEMSFEGGVSQSAYNTLAAMHLSKPEKGPETINKVTEYSMPAE

SEQ ID NO: 54 - protein, 758 aa, Escherichia coli
DPQGYPDRVRQRRSTPIWVYERYPAVDGKPPYTIDDTTKEVIWKYQQENKPDDKPKLEVASWQEEVEGKQVTQFAFIDEADHKTPESLAAAKQRILDAFPGLEVCKDSDYHYEVNCLEYRPGTGVPVTGGMYVPQYTQLDLGADTAKAMLQAADLGTNIQRLYQHELYFRTNGLQGERLNSVDLERLYQNMSVWLWNETKYRYEEGKEDELGFKTFTEFLNCYTNNAYVGTQCSAELKKSLIDNKMIYGEESSKAGMMNPSYPLNYMEKPLTRLMLGRSWWDLNIKVDVEKYPGVVNTNGETVTQNINLYSAPTKWFAGNMQSTGLWAPAQQEVSIESKATVPVTVTVALADDLTGREKHEVSLNRPPRVTKTYDLKANDKVTFKVPYGGLIYIKGDSKEVQSADFTFTGVVKAPFYKDGKWQHDLNSPAPLGELESASFVYTTPKKNLNASNYTGGLEQFANDLDTFASSMNDFYGRDSEDGKHRMFTYKNLPGHKHRFANDVQISIGDAHSGYPVMNSSFSPNSTTLPTTPLNDWLIWHEVGHNAAETPLTVPGATEVANNVLALYMQDRYLGKMNRVADDITVAPEYLEESNGQAWARGGAGDRLLMYAQLKEWAEKNFDIKKWYPDGTPLPEFYSEREGMKGWNLFQLMHRKARGDEVSNDKFGGKNYCAESNGNAADTLMLCASWVAQTDLSEFFKKWNPGANAYQLPGATEMSFEGGVSQSAYNTLASLNLPKPKQGPETINKVTEYSMPAE

SEQ ID NO: 55 - protein, 759 aa, Escherichia coli
DPQGYPNRVRQQRATGIWVYERYPAVDGALPYTIDSKTGEVKWKYQVENKPDDKPKLEVASWLEDVDGKQETRYAFIDEADHKTEDSLKAAKAKIFEKFPGLKECKDPTYHYEVNCLEYRPGTGVPVTGGMYVPQYTQLSLNADTAKAMVQAADLGTNIQRLYQHELYFRTNGRKGERLSSVDLERLYQNMSVWLWNKIEYRYENDKDDELGFKTFTEFLNCYANDAYTGGTQCSDELKKSLVDNNMIYGEKSVNKAGMMNPSYPLNYMEKPLTRLMLGRSWWDLNIKVDVEKYPGAVSAEGEKVTETISLYSNPTKWFAGNMQSTGLWAPAQKEVTIESSASVPVTVTVALADDLTGREKHEVALNRPPKVTKTYDLKANDKVTFKVPYGGLIYIKGNSPKNESAEFTFTGVVKAPFYKDGEWKNALNSPAPLGELESDAFVYTTPKKNLEASNFTGGVAEFAKDLDTFASSMNDFYGRNDEDGKHRMFTYKNLTGHKHRFTNDVQISIGDAHSGYPVMNSSFSTNSTTLPTTPLNDWLIWHEVGHNAAETPLTVPGATEVANNVLALYMQDRYLGKMNRVADDITVAPEYLEESNGQAWARGGAGDRLLMYAQLKEWAEKNFDIKQWYPEGDLPKFYSDREGMKGWNLFQLMHRKARGDDVGKTKFGERNYCAESNGNAADKLMLCASWVAQTDLSEFFKKWNPGANAYQLPGASEMNFEGGVSQSAYETLAALNLPKPQQGPETINQVTEHKMSAE

SEQ ID NO: 56 - protein, 759 aa, Escherichia coli
DPQGYPDRVRQRRATGIWVYERYPVVEGELPYTIDSKTGKVTWKYQIDNKPDKKPKLEVASWQEEVDGKQVTQFAFIDEADHKTTESLDAAKKKILEKFKGLEECKDSTYHYEINCLEYRPGTNVPVTGGMYVPRYTQLNLSADTAKAMVQAADLGTNIQRLYQHELYFRTNGRKGERLSSVDLERLYQNMSVWLWNEIEYSYDSSKEDELGFKTFTEFLNCYANDAYTGGTQCSDELKKSLVDNNMIYGEKSVNKAGMMNPSYPLNYMEKPLTRLMLGRSWWDLNIKVDVEKYPGAVSAEGEKVTETISLYSNPTKWFAGNMQSTGLWAPAQKEVTIESSASVPVTVTVALADDLTGREKHEVALNRPPKVTKTYDLKANDKVTFKVPYGGLIYIKGNSPKNESAEFTFTGVVKAPFYKDGEWKNALNSPAPLGELESDAFVYTTPKKNLEASNFTGGVAEFAKDLDTFASSMNDFYGRNDEDGKHRMFTYKNLTGHKHRFTNDVQISIGDAHSGYPVMNSSFSTNSTTLPTTPLNDWLIWHEVGHNAAETPLTVPGATEVANNVLALYMQDRYLGKMNRVADDITVAPEYLEESNGQAWARGGAGDRLLMYAQLKEWAEKNFDIKTWYPDGNLPAFYSEREGMKGWNLFQLMHRKARGDEVGKTKFGERNYCAESNGNAADTLMLCASWVAQTDLSEFFKKWNPGANAYQLPGASEMNFEGGVSQSAYETLAALNLPKPQQGPETINQVTEHKMSAE

SEQ ID NO: 57 - protein, 759 aa, Escherichia coli; identical to SEQ ID NO: 39

SEQ ID NO: 58 - protein, 1497 aa, Escherichia coli
CDGGGSGSSSDTPSVDSGSGTLPEVKPDPTPTPEPTPEPTPDPEPTPDPTPDPEPTPEPEPEPVPTKTGYLTLGGSQRVTGATCNGESSDGFTFTPGNTVSCVVGSTTIATFNTQSEAARSLRAVDKVSFSLEDAQELANSENKKTNAISLVTSSDSCPADAEQLCLTFSSVVDRARFEKLYKQIDLATDNFSKLVNEEVENNAATDKAPSTHTSTVVPVTTEGTKPDLNASFVSANAEQFYQYQPTEIILSEGQLVDSLGNGVAGVDYYTNSGRGVTDENGKFSFSWGETISFGIDTFELGSVRGNKSTIALTELGDEVRGANIDQLIHRYSTTGQNNTRVVPDDVRKVFAEYPNVINEIINLSLSNGATLDEGDQNVVLPNEFIEQFKTGQAKEIDTAICAKTDGCNEARWFSLTTRNVNDGQIQGVINKLWGVDTNYQSVSKFHVFHDSTNFYGSTGNARGQAVVNISNSAFPILMARNDKNYWLAFGEKRAWDKNELAYITEAPSIVQPENVTRDTATFNLPFISLGQVGEGKLMVIGNPHYNSILRCPNGYSWGGGVNSKGECTLSGDSDDMKHFMQNVLRYLSNDIWQPNTKSIMTVGTNLENVYFKKAGQVLGNSAPFAFHEDFTGITVKQLTSYGDLNPEEIPLLILNGFEYVTQWSGDPYAVPLRADTSKPKLTQQDVTDLIAYLNKGGSVLIMENVMSNLKEESASSFVRLLDAAGLSMALNKSVVNNDPQGYPDRVRQRRATGIWVYERYPAADGAQPPYTIDPNTGEVTWKYQQDNKPDDKPKLEVASWQEEVEGKQVTRYAFIDEAEYTTEESLEAAKAKIFEKFPGLQECKDSTYHYEINCLERRPGTDVPVTGGMYVPRYTQLNLDADTAKAMVQAADLGTNIQRLYQHELYFRTKGSKGERLNSVDLERLYQNMSVWLWNDTKYRYEEGKEDELGFKTFTEFLNCYANDAYAGGTKCSADLKKSLVDNNMIYGDGSSKAGMMNPSYPLNYMEKPLTRLMLGRSWWDLNIKVDVEKYPGSVSAKGESVTENISLYSNPTKWFAGNMQSTGLWAPAQQDVTIKSSASVPVTVTVALADDLTGREKHEVALNRPPRVTKTYTLEANGEVTFKVPYGGLIYIKGDSKDDVSANFTFTGVVKAPFYKDGEWKNDLDSPAPLGELESASFVYTTPKKNLEASNFTGGVAEFAKDLDTFASSMNDFYGRNDEDGKHRMFTYKNLTGHKHRFTNDVQISIGDAHSGYPVMNSSFSTNSTTLPTTPLNDWLIWHAVGHNAAETPLNVPGATEVANNVLALYMQDRYLGKMNRVADDITVAPEYLDESNGQAWARGGAGDRLLMYAQLKEWAEENFDIKQWYPDGELPKFYSDRKGMKGWNLFQLMHRKARGDDVGNSTFGGKNYCAESNGNAADTLMLCASWVAQADLSEFFKKWNPGASAYQLPGATEMSFQGGVSSSAYSTLASLKLPKPEKGPETINKVTEHKMSAE

SEQ ID NO: 59 - protein, 1498 aa, Escherichia coli
CDGGGSGSSSDTPPVDSGTGSLPEVKPDPTPNPEPTPEPTPDPEPTPEPTPDPEPTPEPEPEPVPTKTGYLTLGGSQRITGATCNGESSDGFTFTPGDKVTCVAGNNTTIATFDTQSEAARSLRAVEKVSFSLEDAQELAASDDKKSNAVSLVTSSNSCPANTEQVCLTFSSVIESKRFDSLYKQIDLAPEEFKKLVNEEVENNAATDKAPSTHTSPVVPVTTPGTKPDLNASFVSANAEQFYQYQPTEIILSEGRLVDSMGNGVVGVNYYTSSGRGVTGENGKFNFSWGETISFGIDTFELGSVRGNKSTIALTELGDEVRGANIDQLIHRYSQAGKNDEREVPDVVRKVFAEYPNVINEIINLSLSNGEALSEGDQTFERTNEFLEQFESGQAKEIDTAICDSLGGCNSQRWFSLTARNVNEGQIQGVINKLWGVDKDYKSVTKFHVFHDSTNFYGSTGNARGQAVVNISNAAFPILMARNDKNYWLAFGEKRAWDKNELAYITEAPSLVEPENVTRDTATFNLPFISLGQVGEGKLMVIGNPHYNSILRCPNGYSWEGGVDKNGQCTRNSDSNDMKHFMQNVLRYLSDDKWTPDAKASMTVGTNLDTVYFKRHGQVTGNSAEFGFHPDFAGISVEHLSSYGDLDPQEMPLLILNGFEYVTQVGNDPYAIPLRADTSKPKLTQQDVTDLIAYLNKGGSVLIMENVMSNLKEESASGFVRLLDAAGLSMALNKSVVNNDPQGYPNRVRQQRATGIWVYERYPAVDGALPYTIDSKTGEVKWKYQVENKPDDKPKLEVASWLEDVDGKQETRYAFIDEADHKTEDSLKAAKAKIFEKFPGLKECKDPTYHYEVNCLEYRPGTGVPVTGGMYVPQYTQLSLNADTAKAMVQAADLGTNIQRLYQHELYFRTNGRKGERLSSVDLERLYQNMSVWLWNKIEYRYENDKDDELGFKTFTEFLNCYANDAYTGGTQCSDELKKSLVDNNMIYGEKSVNKAGMMNPSYPLNYMEKPLTRLMLGRSWWDLNIKVDVEKYPGAVSAEGEKVTETISLYSNPTKWFAGNMQSTGLWAPAQKEVTIESSASVPVTVTVALADDLTGREKHEVALNRPPKVTKTYELKANGEVKFTVPYGGLIYIKGNSPQNESAEFTFTGVVKAPFYKDGAWKNALNSPAPLGELESDAFVYTTPKKNLEASNFTGGVAEFAKDLDTFASSMNDFYGRNDEDGKHRMFTYKNLTGHKHRFTNDVQISIGDAHSGYPVMNSSFSTNSTTLPTTPLNDWLIWHAVGHNAAETPLTVPGATEVANNVLALYMQDRYLGKMNRVADDITVAPEYLEESNGQAWARGGAGDRLLMYAQLKEWAEKNFDIKQWYPEGDLPKFYSDREGMKGWNLFQLMHRKARGDEVGKTKFGERNYCAESNGNAADKLMLCASWVAQTDLSEFFKKWNPGANAYQLPGASEMNFEGGVSQSAYETLAALNLPKPQQGPETINQVTEHKMSAE

SEQ ID NO: 60 - protein, 1498 aa, Escherichia coli
CDGGGSGSSSDTPPVDSGTGSLPEVKPDPTPNPEPTPEPTPDPEPTPEPTPDPEPTPEPEPEPVPTKTGYLTLGGSQRITGATCNGESSDGFTFTPGDKVTCVAGNNTTIATFDTQSEAARSLRAVEKVSFSLEDAQELAASDDKKSNAVSLVTSSNSCPADTEQVCLTFSSVIESKRFDSLYKQIDLAPEEFKKLVNEEVENNAATDKAPSTHTSPVVPVTTPGTKPDLNASFVSANAEQFYQYQPTEIILSEGRLVDSMGNGVVGVNYYTSSGRGVTGENGKFNFSWGETISFGIDTFELGSVRGNKSTIALTELGDEVRGANIDQLIHRYSQAGKNDEREVPDVVRKVFAEYPNVINEIINLSLSNGEALSEGDQTFERTNEFLEQFESGQAKEIDTAICDSLGGCNSQRWFSLTARNVNDGQIQGVINKLWGVDTNYKSVSKFHVFHDSTNFYGSTGNARGQAVVNISNAAFPILMARNDKNYWLAFGEKRAWDKNELAYITEAPSLVEPENVTRDTATFNLPFISLGQVGEGKLMVIGNPHYNSILRCPNGYSWEGGVDKNGQCTRNSDSNDMKHFMQNVLRYLSDDKWTPDAKASMTVGTNLDTVYFKRHGQVTGNSAEFGFHPDFAGISVEHLSSYGDLDPQEMPLLILNGFEYVTQVGNDPYAIPLRADTSKPKLTQQDVTDLIAYLNKGGSVLIMENVMSNLKEESASGFVRLLDAAGLSMALNKSVVNNDPQGYPNRVRQQRATGIWVYERYPAVDGALPYTIDSKTGEVKWKYQVENKPDDKPKLEVASWLEDVDGKQETRYAFIDEADHKTEDSLKAAKAKIFEKFPGLKECKDPTYHYEVNCLEYRPGTGVPVTGGMYVPQYTQLSLNADTAKAMVQAADLGTNIQRLYQHELYFRTNGRKGERLSSVDLERLYQNMSVWLWNKIEYRYENDKDDELGFKTFTEFLNCYANDAYTGGTQCSDELKKSLVDNNMIYGEKSVNKAGMMNPSYPLNYMEKPLTRLMLGRSWWDLNIKVDVEKYPGAVSAEGEKVTETISLYSNPTKWFAGNMQSTGLWAPAQKEVTIESTASVAVTVTVALADDLTGREKHEVALNRPPKVTKTYELKANGEVKFTVPYGGLIYIKGNSPQNESAEFTFTGVVKAPFYKDGAWKNALNSPAPLGELESDAFVYTTPKKNLEASNYKGGQEQFAEELDTFASSMNDFYGRNDEDGKHRMFTYKNLTGHKHRFTNDVQISIGDAHSGYPVMNSSFSTNSTTLPTTPLNDWLIWHAAGHNAAETPLTVPGATEVANNVLALYMQDRYLGKMNRVADDITVAPEYLEESNNQAWARGGAGDRLLMYAQLKEWAEKNFDITKWYPEGNLPKFYSEREGMKGWNLFQLMHRKARGDEVGKTKFGERNYCAESNGNAADTLMLCASWVAQTDLSAFFKKWNPGANAYQLPGASEMNFEGGVSQSAYETLAALNLPKPQQGPETINKVTEYSMPAE

SEQ ID NO: 61 - protein, 1497 aa, Escherichia coli
CDGGGSGSSSDTPPVDSGTGSLPEVKPDPTPNPEPTPEPTPDPEPTPEPIPDPEPTPEPEPEPVPTKTGYLTLGGSQRVTGATCNGESSDGFTFKPGEDVTCVAGNTTIATFNTQSEAARSLRAVEKVSFSLEDAQELAGSDDKKSNAVSLVTSSNSCPANTEQVCLTFSSVIESKRFDSLYKQIDLAPEEFKKLVNEEVENNAATDKAPSTHTSPVVPVTTPGTKPDLNASFVSANAEQFYQYQPTEIILSEGRLVDSQGYGVAGVNYYTNSGRGVTGENGEFSFSWGETISFGIDTFELGSVRGNKSTIALTELGDEVRGANIDQLIHRYSTTGQNNTRVVPDDVRKVFAEYPNVINEIINLSLSNGATLGEGEQVVNLPNEFIEQFNTGQAKEIDTAICAKTDGCNEARWFSLTTRNVNDGQIQGVINKLWGVDTNYKSVSKFHVFHDSTNFYGSTGNARGQAVVNISNAAFPILMARNDKNYWLAFGEKRAWDKNELAYITEAPSLVEPENVTRDTATFNLPFISLGQVGEGKLMVIGNPHYNSILRCPNGYSWNGGVNKDGQCTLNSDPDDMKNFMENVLRYLSDDKWKPDAKASMTVGTNLDTVYFKRHGQVTGNSAAFDFHPDFAGISVEHLSSYGDLDPQEMPLLILNGFEYVTQVGNDPYAIPLRADTSKPKLTQQDVTDLIAYLNKGGSVLIMENVMSNLKEESASGFVRLLDAAGLSMALNKSVVNNDPQGYPNRVRQQRATGIWVYERYPAVDGALPYTIDSKTGEVKWKYQVENKPDDKPKLEVASWLEDVDGKQETRYAFIDEADHKTEDSLKAAKEKIFAAFPGLKECTNPAYHYEVNCLEYRPGTGVPVTGGMYVPQYTQLSLNADTAKAMVQAADLGTNIQRLYQHELYFRTNGRKGERLSSVDLERLYQNMSVWLWNDTSYRYEEGKNDELGFKTFTEFLNCYANDAYAGGTKCSADLKKSLVDNNMIYGDGSSKAGMMNPSYPLNYMEKPLTRLMLGRSWWDLNIKVDVEKYPGAVSEEGQNVTETISLYSNPTKWFAGNMQSTGLWAPAQKEVTIKSNANVPVTVTVALADDLTGREKHEVALNRPPRVTKTYSLDASGTVKFKVPYGGLIYIKGNSSTNESASFTFTGVVKAPFYKDGAWKNDLNSPAPLGELESDAFVYTTPKKNLNASNYTGGLEQFANDLDTFASSMNDFHGRDSEDGKHRMFTYKNLPGHKHRFTNDVQISIGDAHSGYPVMNSSFSPNSTTLPTTPLNDWLIWHAVGHNAAETPLTVPGATEVANNVLALYMQDRYLGKMNRVADDITVAPEYLEESNNQAWARGGAGDRLLMYAQLKEWAEKNFDIKKWYPDGTPLPEFYSEREGMKGWNLFQLMHRKARGDEVSNDKFGGKNYCAESNGNAADTLMLCASWVAQTDLSEFFKKWNPGANAYQLPGASEMSFEGGVSQSAYNTLASLDLPKPEQGPETINQVTEHKMSAE

SEQ ID NO: 62 - protein, 1499 aa, Escherichia coli
CDGGGSGSSSDTPPVDSGTGSLPEVKPDPTPNPEPTPEPTPDPEPTPEPTPDPEPTPEPEPEPVPTKTGYLTLGGSLRVTGDITCNDESSDGFTFTPGDKVTCVAGNNTTIATFDTQSEAARSLRAVEKVSFSLEDAQELAGSDNKKSNALSLVTSMNSCPANTEQVCLEFSSVIESKRFDSLYKQIDLAPEEFKKLVNEEVENNAATDKAPSTHTSPVVPVTTPGTKPDLNASFVSANAEQFYQYQPSEIILSEGRLVDSQGYGVAGVNYYTNSGRGVTGENGEFSFSWGETISFGIDTFELGSVRGNKSTIALTELGDEVRGANIDQLIHRYSTTGQNNTRVVPDDVRKVFAEYPNVINEIINLSLSNGATLDEGEQVVNLPNEFIEQFKTGQAKEIDTAICAKTDGCNEARWFSLTTRNVNDGQIQGVINKLWGVDTNYKSVSKFHVFHDSTNFYGSTGNARGQAVVNISNAAFPILMARNDKNYWLAFGEKRAWDKNELAYITEAPSLVEPENVTRDTATFNLPFISLGQVGEGKLMVIGNPHYNSILRCPNGYSWNGGVNKDGQCTLNSDPDDMKNFMENVLRYLSDDKWTPDAKASMTVGTNLDTVYFKRHGQVTGNSAAFDFHPDFAGISVEHLSSYGDLDPQEMPLLILNGFEYVTQVGNDPYAIPLRADTSKPKLTQQDVTDLIAYLNKGGSVLIMENVMSNLKEESASGFVRLLDAAGLSMALNKSVVNNDPQGYPNRVRQQRATGIWVYERYPAVDGALPYTIDSKTGEVKWKYQVENKPDDKPKLEVASWLEDVDGKQETRYAFIDEADHKTEDSLKAAKEKIFAAFPGLKECTNPAYHYEVNCLEYRPGTGVPVTGGMYVPQYTQLSLNADTAKAMVQAADLGTNIQRLYQHELYFRTNGRKGERLSCVDLERLYQNMSVWLWNDTSYRYEEGKNDELGFKTFTEFLNCYANDAYAGGTKCSADLKKSLVDNNMIYGDGSSKAGMMNPSYPLNYMEKPLTRLMLGRSWWDLNIKVDVEKYPGAVSEEGQNVTETISLYSNPTKWFAGNMQSTGLWAPAQKEVTIKSNANVPVTVTVALADDLTGREKHEVALNRPPRVTKTYSLDASGTVKFKVPYGGLIYIKGNSSTNESASFTFTGVVKAPFYKDGAWKNDLNSPAPLGELESDAFVYTTPKKNLNASNYTGGLEQFANDLDTFASSMNDFYGRDSEDGKHRMFTYKNLPGHKHRFANDVQISIGDAHSGYPVMNSSFSPNSTTLPTTPLNDWLIWHAVGHNAAETPLTVPGATEVANNVLALYMQDRYLGKMNRVADDITVAPEYLEESNGQAWARGGAGDRLLMYAQLKEWAEKNFDIKKWYPDGTPLPEFYSEREGMKGWNLFQLMHRKARGDEVSNDKFGGKNYCAESNGNAADTLMLCASWVAQTDLSEFFKKWNPGANAYQLPGASEMSFEGGVSQSAYNTLASLKLPKPEQGPETINKVTEHKMSVE

SEQ ID NO: 63 - protein, 1497 aa, Escherichia coli
CDGGGSGSSSDTPPVDSGTGSLPEVKPDPTPNPEPTPEPTPDPEPTPEPTPDPEPTPEPEPEPVPTKTGYLTLGGSLRVTGDITCNDESSDGFTFTPGDKVTCVAGNNTTIATFDTQSEAARSLRAVEKVSFSLEDAQELAGSDNKKSNALSLVTSMNSCPANTEQVCLEFSSVIESKRFDSLYKQIDLAPEEFKKLVNEEVENNAATDKAPSTHTSPVVPVTTPGTKPDLNASFVSANAEQFYQYQPSEIILSEGRLVDSQGYGVAGVNYYTNSGRGVTGENGEFSFSWGETISFGIDTFELGSVRGNKSTIALTELGDEVRGANIDQLIHRYSTTGQNNTRVVPDDVRKVFAEYPNVINEIINLSLSNGATLGEGEQVVNLPNEFIEQFKTGQAKEIDTAICAKTDGCNEARWFSLTTRNVNDGQIQGVINKLWGVDTNYKSVSKFHVFHDSTNFYGSTGNARGQAVVNISNAAFPILMARNDKNYWLAFGEKRAWDKNDLAYITEAPSIVRPENVTRETATFNLPFISLGQVGDGKLMVIGNPHYNSILRCPNGYSWNGGVNKDGQCTLNSDPDDMKNFMENVLRYLSNDRWLPDAKSSMTVGTNLDTVYFKKHGQVLGNSAPFAFHKDFTGITVKPMTSYGNLNPDEVPLLILNGFEYVTQWGSDPYSIPLRADTSKPKLTQQDVTDLIAYMNKGGSVLIMENVMSNLKEESASGFVRLLDAAGLSMALNKSVVNNDPQGYPDRVRQRRSTPIWVYERYPAVDGKPPYTIDDTTKEVIWKYQQENKPDDKPKLEVASWQEEVEGKQVTQFAFIDEADHKTPESLAAAKQRILDAFPGLEVCKDSDYHYEVNCLEYRPGSGVPVTGGMYVPQYTQLDLGADTAKAMLQAADLGTNIQRLYQHELYFRTNGRQGERLNSVDLERLYQNMSVWLWNETKYRYEEGKEDELGFKTFTEFLNCYTNNAYVGTQCSAELKKSLIDNKMIYGEESSKAGMMNPSYPLNYMEKPLTRLMLGRSWWDLNIKVDVEKYPGAVSEEGQNVTETISLYSNPTKWFAGNMQSTGLWAPAQKEVTIKSNANVPVTVTVALADDLTGREKHEVALNRPPRVTKTYSLDASGTVKFKVPYGGLIYIKGNSSTNESASFTFTGVVKAPFYKDGAWKNDLNSPAPLGELESDAFVYTTPKKNLNASNYTGGLEQFANDLDTFASSMNDFYGRDSESGKHRMFTYKNLTGHKHRFANDVQISIGDAHSGYPVMNSSFSPNSTTLPTTPLNDWLIWHAVGHNAAETPLTVPGATEVANNVLALYMQDRYLGKMNRVADDITVAPEYLEESNGQAWARGGAGDRLLMYAQLKEWAEKNFDIKKWYPEGELPKFFSDREGMKGWNLFQLMHRKARGDDVGNKTFGGKNYCAESNGNAADSLMLCASWVAQTDLSAFFKKWNPGANAYQLPGATEMSFEGGVSQSAYSTLASLKLPKPEQGPETINKVTEHKMSLE

SEQ ID NO: 64 - protein, 1498 aa, Escherichia coli
CDGGGSGSSSDTPPVDSGTGSLPEVKPDPTPNPEPTPEPTPDPEPTPEPTPDPEPTPEPEPEPVPTKTGYLTLGGSLRVTGDITCNDESSDGFTFTPGDKVTCVAGNNTTIATFDTQSEAARSLRAVEKVSFSLEDAQELAGSDNKKSNALSLVTSMNSCPANTEQVCLEFSSVIESKRFDSLYKQIDLAPEEFKKLVNEEVENNAATDKAPSTHTSPVVPVTTPGTKPDLNASFVSANAEQFYQYQPSEIILSEGRLVDSQGYGVAGVNYYTNSGRGVTGENGEFSFSWGETISFGIDTFELGSVRGNKSTIALTELGDEVRGANIDQLIHRYSTTGQNNTRVVPDDVRKVFAEYPNVINEIINLSLSNGATLDEGEQVVNLPNEFIEQFKTGQAKEIDTAICAKTDGCNEARWFSLTTRNVNDGQIQGVINKLWGVDTNYKSVSKFHVFHDSTNFYGSTGNARGQAVVNISNAAFPILMARNDKNYWLAFGEKRAWDKNELAYITEAPSLVEPENVTRDTATFNLPFISLGQVGEGKLMVIGNPHYNSILRCPNGYSWNGGVNKDGQCTLNSDPDDMKNFMENVLRYLSDDKWTPDAKASMTVGTNLDTVYFKRHGQVTGNSAAFDFHPDFAGISVEHLSSYGDLDPQEMPLLILNGFEYVTQVGNDPYAIPLRADTSKPKLTQQDVTDLIAYLNKGGSVLIMENVMSNLKEESASGFVRLLDAAGLSMALNKSVVNNDPQGYPNRVRQQRATGIWVYERYPAVDGALPYTIDSKTGEVKWKYQVENKPDDKPKLEVASWLEDVDGKQETRYAFIDEADHKTEDSLKAAKEKIFAAFPGLKECTNPAYHYEVNCLEYRPGTGVPVTGGMYVPQYTQLSLNADTAKAMVQAADLGTNIQRLYQHELYFRTNGRKGERLSSVDLERLYQNMSVWLWNDTSYRYEEGKNDELGFKTFTEFLNCYANDAYAGGTKCSADLKKSLVDNNMIYGDGSSKAGMMNPSYPLNYMEKPLTRLMLGRSWWDLNIKVDVEKYPGAVSEEGQNVTETISLYSNPTKWFAGNMQSTGLWAPAQKEVTIKSNANVPVTVTVALADDLTGREKHEVALNRPPRVTKTYSLDASGTVKFKVPYGGLIYIKGNSSTNESASFTFTGVVKAPFYKDGAWKNDLNSPAPLGELESDAFVYTTPKKNLNASNYTGGLEQFANDLDTFASSMNDFYGRDETSGKHRMFTYKNLTGHKHRFTNDVQISIGDAHSGYPVMNSSFSTNSTTLPTTPLNDWLIWHAVGHNAAETPLTVPGATEVANNVLALYMQDRYLGKMNRVADDITVAPEYLEESNGQAWARGGAGDRLLMYAQLKEWAEKNFDIKKWYPEGELPKFFSDREGMKGWNLFQLMHRKARGDDVGDKTFGGKNYCAESNGNAADTLMLCASWVAQTDLSAFFKKWNPGANAYQLPGATEMSFEGGVSQSAYSTLASLKLPKPEQGPETINKVTEHKMSLE

SEQ ID NO: 65 - protein, 1498 aa, Escherichia coli
CDGGGSGSSSDTPPVDSGTGSLPEVKPDPTPNPEPTPEPTPDPEPTPEPTPDPEPTPEPEPEPVPTKTGYLTLGGSLRVTGDITCNDESSDGFTFTPGDKVTCVAGNNTTIATFDTQSEAARSLRAVEKVSFSLEDAQELAGSDNKKSNALSLVTSMNSCPANTEQVCLEFSSVIESKRFDSLYKQIDLAPEEFKKLVNEEVENNAATDKAPSTHTSPVVPATTPGTKPDLNASFVSANAEQFYQYQPTEIILSEGRLVDSQGDGVVGVNYYTNSGRGVTGENGEFSFSWGETISFGIDTFELGSVRGNKSTIALTELGDEVRGANIDQLIHRYSKAGQNHTRVVPDEVRKVFAEYPNVINEIINLSLSNGATLGEGEQVVNLPNEFIEQFKTGQAKEIDTAICAKTDGCNEARWFSLTTRNVNDGKIQGVINKLWGVDTNYKSVSKFHVFHDSTNFYGSTGNARGQAVVNISNAAFPILMARNDKNYWLAFGEKRAWDKNELAYITEAPSIVRPENVTRETATFNLPFISLGQVGDGKLMVIGNPHYNSILRCPNGYSWNGGVNKDGQCTLNSDPDDMKNFMENVLRYLSDDKWTPDAKASMTVGTNLDTVYFKRHGQVTGNSAAFDFHPDFAGISVEHLSSYGDLDPQEMPLLILNGFEYVTQVGNDPYAIPLRADTSKPKLTQQDVTDLIAYLNKGGSVLIMENVMSNLKEESASGFVRLLDAAGLSMALNKSVVNNDPQGYPNRVRQRRSTPIWVYERYPAVDGKPPYTIDDTTKEVIWKYQQENKPDDKPKLEVASWQEEVEGKQVTQFAFIDEADHKTPESLAAAKQRILDAFPGLEVCKDSDYHYEVNCLEYRPGTDVPVTGGMYVPQYTQLDLSADTAKAMLQAADLGTNIQRLYQHELYFRTNGRQGERLNSVDLERLYQNMSVWLWNETKYRYEEGKEDELGFKTFTEFLNCYTNNAYVGTQCSAELKKSLIDNKMIYGEESSKAGMMNPSYPLNYMEKPLTRLMLGRSWWDLNIKVDVEKYPGVVNTNGETVTQNINLYSAPTKWFAGNMQSTGLWAPAQQEVSIESKATVPVTVTVALADDLTGREKHEVSLNRPPRVTKTYDLKANDKVTFKVPYGGLIYIKGDSKEVQSADFTFTGVVKAPFYKDGKWQHDLNSPAPLGELESASFVYTTPKKNLNASNYTGGLEQFANDLDTFASSMNDFYGRDSEDGKHRMFTYKNLPGHKHRFANDVQISIGDAHSGYPVMNSSFSPNSTTLPTTPLNDWLIWHAVGHNAAETPLTVPGATEVANNVLALYMQDRYLGKMNRVADDITVAPEYLEESNGQAWARGGAGDRLLMYAQLKEWAEKNFDIKKWYPDGTPLPEFYSEREGMKGWNLFQLMHRKARGDEVSNDKFGGKNYCAESNGNAADTLMLCASWVAQTDLSEFFKKWNPGANAYQLPGASEMSFEGGVSQSAYNTLASLKLPKPEQGPETINKVTEHKMSVE

SEQ ID NO: 66 - protein, 1497 aa, Escherichia coli
CDGGGSGSSSDTPSVDSGSGTLPEVKPDPTPTPEPTPEPTPDPEPTPDPTPDPDPEPTPEPEPEPVPTKTGYLTLGGSQRVTGATCNGESSDGFTFTPGNTVSCVVGSTTIATFNTQSEAARSLRAVDKVSFSLEDAQELANSENKKTNAISLVTSSDSCPADAEQLCLTFSSVVDRARFEKLYKQIDLATDNFSKLVNEEVENNAATDKAPSTHTSTVVPVTTEGTKPDLNASFVSANAEQFYQYQPTEIILSEGQLVDSLGNGVAGVDYYTNSGRGVTDENGKFSFSWGETISFGIDTFELGSVRGNKSTIALTELGDEVRGANIDQLIHRYSTTGQNNTRVVPDDVRKVFAEYPNVINEIINLSLSNGATLDEGDQNVVLPNEFIEQFKTGQAKEIDTAICAKTNGCNEARWFSLTTRNVNDGQIQGVINKLWGVDTNYQSVSKFHVFHDSTNFYGSTGNARGQAVVNISNAAFPILMARNDKNYWLAFGEKRAWDKNELAYITEAPSIVQPENVTRDTATFNLPFISLGQVGDGKLMVIGNPHYNSILRCPNGYSWGGGVNSKGECTLSGDSDDMKHFMQNVLRYLSNDIWQPNTKSIMTVGTNLENVYFKKAGQVLGNSAPFAFHEDFTGITVKQLTSYGDLNPEEIPLLILNGFEYVTQWSGDPYAVPLRADTSKPKLTQQDVTDLIAYLNKGGSVLIMENVMSNLKEESASSFVRLLDAAGLSMALNKSVVNNDPQGYPDRVRQQREKGIWVYERYPFVDGKPPYTIDETTKEVIWKYQQDNKPDDKPKLEVASWLEDVDGKQVKRYAFIDEAEHETNESLEAAKAKIIKAFPGLEECKDPTYHYEVNCLEYRPGTNVPVTGGMYVPRYTQLNLSADTAKAMVQAADLGTNIQRLYQHELYFRTNGRKGERLSSVDLERLYQNMSVWLWNEIEYSYDSSKEDELGFKTFTEFLNCYANDAYTKGTLCSAELKQSLIDNKMIYGEGSKAGMMNPSYPLNYMEKPLTRLMLGRSWWDLNIKVDVEKYPGAVSVGGEEVTETISLYSNPTKWFAGNMQSTGLWAPAQKEVTIKSNANVPVTVTVALADDLTGREKHEVALNRPPRVTKTYSLDASGTVKFKVPYGGLIYIKGNSSTNESASFTFTGVVKAPFYKDGAWKNDLNSPAPLGELESASFVYTTPKKNLNASNYTGGLDQFAKDLDTFASSMNDFYGRNDEDGKHRMFTYKNLTGHKHRFTNDVQISIGDAHSGYPVMNSSFSTNSTTLPTTPLNDWLIWHAVGHNAAETPLNVPGATEVANNVLALYMQDRYLGKMNRVADDITVAPEYLDESNGQAWARGGAGDRLLMYAQLKEWAEKNFDITKWYPDGKLPAFYSEREGMKGWNLFQLMHRKARGDDVGNSTFGGKNYCAESNGNAADTLMLCASWVAQTDLSEFFKKWNPGANAYQLPGAAEMSFEGGVSSSAYSTLASLNLPKPEKGPETINKVTEHKMSAE

SEQ ID NO: 67 - protein, 1496 aa, Escherichia coli
CDGGGSGSSSDTPPVDSGTGSLPEVKPDPTPNPEPTPEPTPDPEPTPEPIPDPEPTPEPEPEPVPTKTGYLTLGGSQRVTGATCNGESSDGFTFKPGEDVTCVAGNTTIATFNTQSEAARSLRAVEKVSFSLEDAQELAGSDDKKSNAVSLVTSSNSCPANTEQVCLTFSSVIESKRFDSLYKQIDLAPEEFKKLVNEEVENNAATDKAPSTHTSPVVPVTTPGTKPDLNASFVSANAEQFYQYQPTEIILSEGRLVDSQGYGVAGVNYYTNSGRGVTGENGEFSFSWGEAISFGIDTFELGSVRGNKSTIALTELGDEVRGANIDQLIHRYSTTGQNNTRVVPDDVRKVFAEYPNVINEIINLSLSNGATLGEGEQVVNLPNEFIEQFNTGQAKEIDTAICAKTDGCNEARWFSLTTRNVNDGQIQGVINKLWGVDTNYKSVSKFHVFHDSTNFYGSTGNARGQAVVNISNAAFPILMARNDKNYWLAFGEKRAWDKNELAYITEAPSIVRPENVTRETASFNLPFISLGQVGDGKLMVIGNPHYNSILRCPNGYSWNGGVNKDGQCTLNSDPDDMKNFMENVLRYLSNDRWLPDAKSSMTVGTNLETVYFKKHGQVLGNSAPFAFHKDFTGITVKPMTSYGNLNPDEVPLLILNGFEYVTQWGSDPYSIPLRADTSKPKLTQQDVTDLIAYMNKGGSVLIMENVMSNLKEESASGFVRLLDAAGLSMALNKSVVNNDPQGYPDRVRQRRSTPIWVYERYPAVDGKPPYTIDDTTKEVIWKYQQENKPDDKPKLEVASWQEEVEGKQVTQFAFIDEADHKTPESLAAAKQRILDAFPGLEVCKDSDYHYEVNCLEYRPGTDVPVTGGMYVPQYTQLDLSADTAKAMLQAADLGTNIQRLYQHELYFRTNGRQGERLNSVDLERLYQNMSVWLWNETKYRYEEGKEDELGFKTFTEFLNCYTNNAYVGTQCSAELKKSLIDNKMIYGEESSKAGMMNPSYPLNYMEKPLTRLMLGRSWWDLNIKVDVEKYPGVVNTNGETVTQNINLYSAPTKWFAGNMQSTGLWAPAQQEVSIESKSTVPVTVTVALADDLTGREKHEVSLNRPPRVTKTYDLKANDKVTFKVPYGGLIYIKGDSKEVQSADFTFTGVVKAPFYKDGKWQHDLNSPAPLGELESASFVYTTPKKNLNASNYTGGLEQFANDLDTFASSMNDFYGRDSEDGKHRMFTYKNLPGHKHRFANDVQISIGDAHSGYPVMNSSFSPNSTTLPTTPLNDWLIWHAVGHNAAETPLTVPGATEVANNVLALYMQDRYLGKMNRVADDITVAPEYLEESNGQAWARGGAGDRLLMYAQLKEWAEKNFDIKKWYPDGTPLPEFYSEREGMKGWNLFQLMHRKARGDEVSNDKFGGKNYCAESNGNAADTLMLCASWVAQTDLSEFFKKWNPGANAYQLPGASEMSFEGGVSQSAYNTLASLDLPKPEQGPETINQVTEHKMSAE

SEQ ID NO: 68 - protein, 1500 aa, Escherichia coli
CDGGGSGSSSDTPPVDSGTGSLPEVKPDPTPNPEPTPEPTPDPEPTPEPTPDPEPTPEPEPEPVPTKTGYLTLGGSQRITGATCNGESSDGFTFTPGDKVTCVAGNNTTIATFDTQSEAARSLRAVEKVSFSLEDAQELAASDDKKSNAVSLVTSSNSCPANTEQVCLTFSSVIESKRFDSLYKQIDLAPEEFKKLVNEEVENNAATDKAPSTHTSPVVPVTTPGTKPDLNASFVSANAEQFYQYQPTEIILSEGRLVDSMGNGVVGVNYYTSSGRGVTGENGKFNFSWGETISFGIDTFELGSVRGNKSTIALTELGDEVRGANIDQLIHRYSQAGKNDEREVPDVVRKVFAAYPNVINEIINLSLSNGEALSEGDQTFERTNEFLEQFESGQAKEIDTAICDSLGGCNSQRWFSLTARNVNEGQIQGVINKLWGVDKDYKSVTKFHVFHDSTNFYGSTGNARGQAVVNISNAAFPILMARNDKNYWLAFGEKRAWDKNELAYITEAPSLVEPENVTRDTATFNLPFISLGQVGEGKLMVIGNPHYNSILRCPNGYSWEGGVDKNGQCTRNSDSNDMKHFMQNVLRYLSNDKWTPDAKASMTVGTNLDTVYFKRHGQVTGNSAEFGFHPDFAGISVEHLSSYGDLDPQKMPLLILNGFEYVTQVGGDPYAVPLRADTSKPKLSQQDVTDLIAYLNKGGSVLIMENVMSNLKEESASGFVRLLDAAGLSMALNKSVVNNDPQGYPDRVRQRRATGIWVYERYPVVEGELPYTIDSKTGKVTWKYQIDNKPDKKPKLEVASWQEEVDGKQVTQFAFIDEADHKTTESLDAAKKKILEKFKGLEECKDSTYHYEINCLEYRPGTNVPATGGMYVPRYTQLNLSADTAKAMVQAADLGTNIQRLYQHELYFRTNGRKGERLSSVDLERLYQNMSVWLWNEIEYSYDSSKEDELGFKTFTEFLNCYANDAYTGGTQCSDELKKSLVDNNMIYGEKSVNKAGMMNPSYPLNYMEKPLTRLMLGRSWWDLNIKVDVEKYPGAVSEEGQEVTESISLYSNPTKWFAGNMQSTGLWAPAQKEVTIKSNADVPVTVTVALADDLTGREKHEVALNRPPKVTKTYELKANGEVKFTVPYGGLIYIKGNSKENNKSASFTFTGVVKAPFYKNGAWKNALNSPAPLGELESDAFVYTTPKKNLEASNFTGGVAEFAKDLDTFASSMNDFYGRNDEDGKHRMFTYKNLTGHKHRFTNDVQISIGDAHSGYPVMNSSFSTNSTTLPTTPLNDWLIWHAVGHNAAETPLTVPGATEVANNVLALYMQDRYLGKMNRVADDITVAPEYLEESNNQAWARGGAGDRLLMYAQLKEWAEKNFDIKKWYPDGTPLPEFYSEREGMKGWNLFQLMHRKARGDEVSNDKFGGRNYCAESNGNTADTLMLCASWVAQTDLSEFFKKWNPGANAYQLPGATEMSFEGGVSQSAYNTLASLDLPKPKQGPETINKVTEYSMPAE

SEQ ID NO: 69 - protein, 1495 aa, Escherichia coli
CDGGGSGSSSDTPPVDSGTGSLPEVKPDPTPNPEPTPEPTPDPEPTPEPIPDPEPTPEPEPEPVPTKTGYLTLGGSQRVTGATCNGESSDGFTFKPGEDVTCVAGNTTIATFNTQSEAARSLRAVEKVSFSLEDAQELAGSDDKKSNAVSLVTSSNSCPANTEQVCLTFSSVIESKRFDSLYKQIDLAPEEFKKLVNEEVENNAATDKAPSTHTSPVVPVTTPGTKPDLNASFVSANAEQFYQYQPTEIILSEGRLVDSQGYGVAGVNYYTNSGRGVTGENGEFSFSWGETISFGIDTFELGSVRGNKSTIALTELGDEVRGANIDQLIHRYSTTGQNNTRVVPDDVRKVFAEYPNVINEIINLSLSNGATLGEGEQVVNLPNEFIEQFNTGQAKEIDTAICAKTDGCNEARWFSLTTRNVNDGQIQGVINKLWGVDTNYKSVSKFHVFHDSTNFYGSTGNARGQAVVNISNAAFPILMARNDKNYWLAFGEKRAWDKNELAYITEAPSIVRPENVTRETATFNLPFISLGQVGDGKLMVIGNPHYNSILRCPNGYSWNGGVNKDGQCTLNSDPDDMKNFMENVLRYLSNDRWLPDAKSNMTVGTNLDTVYFKKHGQVTGNSAAFGFHPDFAGISVEHLSSYGDLDPQEMPLLILNGFEYVTQVGNDPYAIPLRADTSKPKLTQQDVTDLIAYMNKGGSVLIMENVMSNLKEESASGFVRLLDAAGLSMALNKSVVNNDPQGYPDRVRQRRSTPIWVYERYPAVDGKPPYTIDDTTKEVIWKYQQENKPDDKPKLEVASWQEEVEGKQVTQFAFIDEADHKTPESLAAAKKRILDAFPGLEECKDSDYHYEVNCLEYRPGTGVPVTGGMYVPQYTQLSLNADTAKAMVQAADLGTNIQRLYQHELYFRTNGRKGERLSSVDLERLYQNMSVWLWNKIEYRYENDKDDELGFKTFTEFLNCYANNAYDGGTQCSAELKQSLIDNKMIYGEGSKAGMMNPSYPLNYMEKPLTRLMLGRSWWDLNIKVDVEKYPGAVSAEGEEVTETINLYSNPTKWFAGNMQSTGLWAPAQQEVSIKSNAKVPVTVTVALADDLTGREKHEVALNRPPRVTKTYSLDASGTVKFKVPYGGLIYIKSDSKEEKSANFTFTGVVKAPFYKDGKWKNDLKSPAPLGELESASFVYTTPKKNLEASNYKGGLKQFAEDLDTFASSMNDFYGRDGESGKHRMFTYEALTGHKHRFTNDVQISIGDAHSGYPVMNSSFSPNSTTLPTTPLNDWLIWHAVGHNAAETPLTVPGATEVANNVLALYMQDRYLGKMNRVADDITVAPEYLEESNGQAWARGGAGDRLLMYAQLKEWAEKNFDIKQWYPEGSLPAFYSEREGMKGWNLFQLMHRKARGDDVGNDKFGNRNYCAESNGNAADTLMLCASWVAQTDLSAFFKKWNPGANAYQLPGATEMSFEGGVSQSAYNTLASLDLPKPKQGPETINKVTEYSMPAE

SEQ ID NO: 70 - protein, 1497 aa, Escherichia coli
CDGGGSGSSSDTPPVDSGTGSLPEVKPDPTPNPEPTPEPTPDPEPTPEPIPDPEPTPEPEPEPVPTKTGYLTLGGSQRVTGATCNGESSDGFTFKPGEDVTCVAGNTTIATFNTQSEAARSLRAVEKVSFSLEDAQELAGSDDKKSNAVSLVTSSNSCPANTEQVCLTFSSVIESKRFDSLYKQIDLAPEEFKKLVNEEVENNAATDKAPSTHTSPVVPVTTPGTKPDLNASFVSANAEQFYQYQPTEIILSEGRLVDSQGYGVAGVNYYTNSGRGVTGENGEFSFSWGETISFGIDTFELGSVRGNKSTIALTELGDEVRGANIDQLIHRYSTTGQNNTRVVPDDVRKVFAEYPNVINEIINLSLSNGATLGEGEQVVNLPNEFIEQFNTGQAKEIDTAICAKTDGCNEARWFSLTTRNVNDGQIQGVINKLWGVDTNYKSVSKFHVFHDSTNFYGSTGNARGQAVVNISNAAFPILMARNDKNYWLAFGEKRAWDKNELAYITEAPSLVEPENVTRDTATFNLPFISLGQVGEGKLMVIGNPHYNSILRCPNGYSWNGGVNKDGQCTLNSDPDDMKNFMENVLRYLSDDKWKPDAKASMTVGTNLDTVYFKRHGQVTGNSAAFDFHPDFAGISVEHLSSYGDLDPQEMPLLILNGFEYVTQVGNDPYAIPLRADTSKPKLTQQDVTDLIAYLNKGGSVLIMENVMSNLKEESASGFVRLLDAAGLSMALNKSVVNNDPQGYPNRVRQQRATGIWVYERYPAVDGALPYTIDSKTGEVKWKYQVENKPDDKPKLEVASWLEDVDGKQETRYAFIDEADHKTEDSLKAAKEKIFAAFPGLKECTNPAYHYEVNCLEYRPGTGVPVTGGMYVPQYTQLSLNADTAKAMVQAADLGTNIQRLYQHELYFRTNGRKGERLSSVDLERLYQNMSVWLWNDTSYRYEEGKNDELGFKTFTEFLNCYANDAYAGGTKCSADLKKSLVDNNMIYGDGSSKAGMMNPSYPLNYMEKPLTRLMLGRSWWDLNIKVDVEKYPGAVSEEGQNVTETISLYSNPTKWFAGNMQSTGLWAPAQKEVTIKSNANVPVTVTVALADDLTGREKHEVALNRPPRVTKTYSLDASGTVKFKVPYGGLIYIKGNSSTNESASFTFTGVVKAPFYKDGAWKNDLNSPAPLGELESDAFVYTTPKKNLNASNYTGGLEQFANDLDTFASSMNDFYGRDSEDGKHRMFTYKNLPGHKHRFTNDVQISIGDAHSGYPVMNSSFSPNSTTLPTTPLNDWLIWHAVGHNAAETPLTVPGATEVANNVLALYMQDRYLGKMNRVADDITVAPEYLEESNNQAWARGGAGDRLLMYAQLKEWAEKNFDIKKWYPDGTPLPEFYSEREGMKGWNLFQLMHRKARGDEVSNDKFGGKNYCAESNGNAADTLMLCASWVAQTDLSEFFKKWNPGANAYQLPGASEMSFEGGVSQSAYNTLASLDLPKPEQGPETINQVTEHKMSAE

SEQ ID NO: 71 - protein, 1495 aa, Escherichia coli
CDGGGSGSSSDTPPVDSGTGSLPEVKPDPTPNPEPTPEPTPDPEPTPEPIPDPEPTPEPEPEPVPTKTGYLTLGGSQRVTGATCNGESSDGFTFKPGEDVTCVAGNTTIATFNTQSEAARSLRAVEKVSFSLEDAQELAGSDDKKSNAVSLVTSSNSCPANTEQVCLTFSSVIESKRFDSLYKQIDLAPEEFKKLVNEEVENNAATDKAPSTHTSPVVPVTTPGTKPDLNASFVSANAEQFYQYQPTEIILSEGRLVDSQGYGVAGVNYYTNSGRGVTGENGEFSFSWGETISFGIDTFELGSVRGNKSTIALTELGDEVRGANIDQLIHRYSTTGQNNTRVVPEDVRKVFAEYPNVINEIINLSLSNGATLGEGEQVVNLPNEFIEQFNTGQAKEIDTAICAKTDGCNEARWFSLTTRNVNDGQIQGVINKLWGVDTNYKSVSKFHVFHDSTNFYGSTGNARGQAVVNISNAAFPILMARNDKNYWLAFGEKRAWDKNELAYITEAPSIVRPENVTRETATFNLPFISLGQVGDGKLMVIGNPHYNSILRCPNGYSWNGGVNKDGQCTLNSDPDDMKNFMENVLRYLSNDRWLPDAKSNMTVGTNLDTVYFKKHGQVTGNSAAFGFHPDFAGISVEHLSSYGDLDPQEMPLLILNGFEYVTQVGNDPYAIPLRADTSKPKLTQQDVTDLIAYMNKGGSVLIMENVMSNLKEESASGFVRLLDAAGLSMALNKSVVNNDPQGYPDRVRQRRSTPIWVYERYPAVDGKPPYTIDDTTKEVIWKYQQENKPDDKPKLEVASWQEEVEGKQVTQFAFIDEADHKTPESLAAAKKRILDAFPGLEECKDSDYHYEVNCLEYRPGTGVPVTGGMYVPQYTQLSLNADTAKAMVQAADLGTNIQRLYQHELYFRTNGRKGERLSSVDLERLYQNMSVWLWNKIEYRYENDKDDELGFKTFTEFLNCYANNAYDGGTQCSAELKQSLIDNKMIYGEGSKAGMMNPSYPLNYMEKPLTRLMLGRSWWDLNIKVDVEKYPGAVSAEGEEVTETINLYSNPTKWFAGNMQSTGLWAPAQQEVSIKSNAKVPVTVTVALADDLTGREKHEVALNRPPRVTKTYSLDASGTVKFKVPYGGLIYIKSDSKEEKSANFTFTGVVKAPFYKDGKWKNDLKSPAPLGELESASFVYTTPKKNLEASNYKGGLKQFAEDLDTFASSMNDFYGRDGESGKHRMFTYEALTGHKHRFTNDVQISIGDAHSGYPVMNSSFSPNSTTLPTTPLNDWLIWHAVGHNAAETPLTVPGATEVANNVLALYMQDRYLGKMNRVADDITVAPEYLEESNGQAWARGGAGDRLLMYAQLKEWAEKNFDIKQWYPEGSLPAFYSEREGMKGWNLFQLMHRKARGDDVGNDKFGNRNYCAESNGNAADTLMLCASWVAQTDLSAFFKKWNPGANAYQLPGATEMSFEGGVSQSAYNTLASLDLPKPEQGPETINQVTEHKMSAE

SEQ ID NO: 72 - protein, 1501 aa, Escherichia coli
CDGGGSGPSSDTPPVDSGTGSLPEVKPDPTPNPEPTPEPTPDPEPTPDPTPDPEPTPEPEPEPVPTKTGYLTLGGSQRITGATCNGESSDGFTFTPGDKVTCVAGNNTTIATFDTQSEAARSLRAVEKVSFSLEDAQELAASDDKKSNAVSLVTSSNSCPADTEQVCLTFSSVIESKRFDSLYKQIDLAPEEFKKLVNEEVENNAATDKAPSTHTSPVVPVTTPGTKPDLNASFVSANAEQFYQYQPTEIILSEGRLVDSQGYGVAGVNYYTNSGRGVTGENGEFSFSWGETISFGIDTFELGSVRGNKSTIALTELGDEVRGANIDQLIHRYSTTGQNNTRVVPDDVRKVFAEYPNVINEIINLSLSNGATLDEGDQNVVLPNEFIEQFKTGQAKEIDTAICAKTDGCNEARWFSLTTRNVNDGQIQGVINKLWGVDKDYKSVTKFHVFHDSTNFYGSTGNARGQAVVNISNAAFPILMARNDKNYWLAFGEKRAWDKNELAYITEAPSIVQPENVTRDTATFNLPFISLGQVGEGKLMVIGNPHYNSILRCPNGYSWNGGVNKDGQCTLSGDSDDMKHFMQNVLRYLSDDKWTPDAKASMTVGTNLDTVYFKRHGQVTGNSAEFGFHPDFAGISVEHLSSYGDLDPQEMPLLILNGFEYVTQVGNDPYAIPLRADTSKPKLTQQDVTDLIAYLNKGGSVLIMENVMSNLKEESASGFVRLLDAAGLSMALNKSVVNTDPQGYPNRVRQQREKGIWVYERYPAVDSAQPPYTIDPDTGKVTWKYQEEGKPDDKPKLEVASWQEDVDGKQVTRYAFIDEAEHSTEESLEAAKAKIFEKFPGLQECKDSTYHYEINCLERRPGTDVPVTGGMYVPRYTQLNLDADTAKAMVQAADLGTNIQRLYQHELYFRTNGRKGERLSSVDLERLYQNMSVWLWNKIEYRYENDKDDELGFKTFTEFLNCYANNAYSEGTQCSADLKKSLVDNNMIYGDGSSKAGMMNPSYPLNYMEKPLTRLMLGRSWWDLNIKVDVEKYPGAVSAEGEKVTETISLYSNPTKWFAGNMQSTGLWAPAQQEVTIESTASVPVTVTVALADDLTGREKHEVALNRPPKVTKTYDLKANDKVTFKVPYGGLIYIKGNSPKNESAEFTFTGVVKAPFYKDGEWKNALNSPAPLGELESDSFVYTAPKNNLNASNYSNYTDGVAEFAKELDTFASSMNDFYGRDGESGNHRMFTYKALTGHKHRFANDVQISIGDAHSGYPVMNSSFSTNSTTLPTTPLNDWLIWHAVGHNAAETPLNVPGATEVANNVLALYMQDRYLGKMNRVADDITVAPEYLDESNGQAWARGGAGDRLLMYAQLKEWAEENFDIKQWYPDGELPKFYSDRKGMKGWNLFQLMHRKARGDDVSNDKFGGRNYCAESNGNAADTLMLCASWVAQADLSEFFKKWNPGANAYQLPGASEMSFEGGVSQSAYNTLAAMHLSKPEKGPETINKVTEYSMPAE

SEQ ID NO: 73 - protein, 1498 aa, Escherichia coli
CDGGGSGSSSDTPPVDSGTGSLPEVKPDPTPNPEPTPEPTPDPEPTPEPTPDPEPTPEPEPEPVPTKTGYLTLGGSLRVTGDITCNDESSDGFTFTPGDKVTCVAGNNTTIATFDTQSEAARSLRAVEKVSFSLEDAQELAGSDNKKSNALSLVTSMNSCPANTEQVCLEFSSVIESKRFDSLYKQIDLAPEEFKKLVNEEVENNAATDKAPSTHTSPVVPATTPGTKPDLNASFVSANAEQFYQYQPTEIILSEGRLVDSQGDGVVGVNYYTNSGRGVTGENGEFSFSWGETISFGIDTFELGSVRGNKSTIALTELGDEVRGANIDQLIHRYSKAGQNHTRVVPDEVRKVFAEYPNVINEIINLSLSNGATLGEGEQVVNLPNEFIEQFKTGQAKEIDTAICAKTDGCNEARWFSLTTRNVNDGQIQGVINKLWGVDTNYKSVSKFHVFHDSTNFYGSTGNARGQAVVNISNAAFPILMARNDKNYWLAFGEKRAWDKNELAYITEAPSIVRPENVTRETATFNLPFISLGQVGDGKLMVIGNPHYNSILRCPNGYSWNGGVNKDGQCTLNSDPDDMKNFMENVLRYLSNDRWLPDAKSSMTVGTNLDTVYFKKHGQVLGNSAPFAFHKDFTGITVKPMTSYGNLNPDEVPLLILNGFEYVTQWGSDPYSIPLRADTSKPKLTQQDVTDLIAYMNKGGSVLIMENVMSNLKEESASGFVRLLDAAGLSMALNKSVVNNDPQGYPDRVRQRRSTPIWVYERYPAVDGKPPYTIDDTTKEVIWKYQQENKPDDKPKLEVASWQEEVEGKQVTQFAFIDEADHKTPESLAAAKQRILDAFPGLEVCKDSDYHYEVNCLEYRPGTGVPVTGGMYVPQYTQLDLGADTAKAMLQAADLGTNIQRLYQHELYFRTNGLQGERLNSVDLERLYQNMSVWLWNETKYRYEEGKEDELGFKTFTEFLNCYTNNAYVGTQCSAELKKSLIDNKMIYGEESSKAGMMNPSYPLNYMEKPLTRLMLGRSWWDLNIKVDVEKYPGVVNTNGETVTQNINLYSAPTKWFAGNMQSTGLWAPAQQEVSIESKATVPVTVTVALADDLTGREKHEVSLNRPPRVTKTYDLKANDKVTFKVPYGGLIYIKGDSKEVQSADFTFTGVVKAPFYKDGKWQHDLNSPAPLGELESASFVYTTPKKNLNASNYTGGLEQFANDLDTFASSMNDFYGRDSEDGKHRMFTYKNLPGHKHRFANDVQISIGDAHSGYPVMNSSFSPNSTTLPTTPLNDWLIWHAVGHNAAETPLTVPGATEVANNVLALYMQDRYLGKMNRVADDITVAPEYLEESNGQAWARGGAGDRLLMYAQLKEWAEKNFDIKKWYPDGTPLPEFYSEREGMKGWNLFQLMHRKARGDEVSNDKFGGKNYCAESNGNAADTLMLCASWVAQTDLSEFFKKWNPGANAYQLPGATEMSFEGGVSQSAYNTLASLNLPKPKQGPETINKVTEYSMPAE

SEQ ID NO: 74 - protein, 1495 aa, Escherichia coli
CDGGGSGSSSDTPPVDSGTGSLPEVKPDPTPNPEPTPEPTPDPEPTPEPTPDPEPEPEPEPVPTKTGYLTLGGSQRVTGATCNGESSDGFTFTPGEDVTCVAGNTTIATFDTQSEAARSLRAVEKVSFSLEDAQELAASDDKKSNAVSLVTSSNSCPANTEQVCLTFSSVIESKRFDSLYKQIDLAPEEFKKLVNEEVENNAATDKAPSTHTSPVVPVTTPGTKPDLNASFVSANAEQFYQYQPTEIILSEGRLVDSMGNGVVGVNYYTSSGRGVTGENGKFNFSWGETISFGIDTFELGSVRGNKSTIALTELGDEVRGANIDQLIHRYSQAGKNDEREVPDVVRKVFAEYPNVINEIINLSLSNGEALSEGDQTFERTNEFLEQFESGQAKEIDTAICDSLGGCNSQRWFSLTARNVNEGQIQGVINKLWGVDKDYKSVTKFHVFHDSTNFYGSTGNARGQAVVNISNAAFPILMARNDKNYWLAFGEKRAWDKNELAYITEAPSLVEPENVTRDTATFNLPFISLGQVGEGKLMVIGNPHYNSILRCPNGYSWEGGVDKNGQCTRNSDSNDMKHFMQNVLRYLSDDKWTPDAKASMTVGTNLDTVYFKRHGQVTGNSAEFGFHPDFAGISVEHLSSYGDLDPQEMPLLILNGFEYVTQVGNDPYAIPLRADTSKPKLTQQDVTDLIAYLNKGGSVLIMENVMSNLKEESASGFVRLLDAAGLSMALNKSVVNNDPQGYPNRVRQQRATGIWVYERYPAVDGALPYTIDSKTGEVKWKYQVENKPDDKPKLEVASWLEDVDGKQETRYAFIDEADHKTEDSLKAAKAKIFEKFPGLKECKDPTYHYEVNCLEYRPGTGVPVTGGMYVPQYTQLSLNADTAKAMVQAADLGTNIQRLYQHELYFRTNGRKGERLSSVDLERLYQNMSVWLWNKIEYRYENDKDDELGFKTFTEFLNCYANDAYTGGTQCSDELKKSLVDNNMIYGEKSVNKAGMMNPSYPLNYMEKPLTRLMLGRSWWDLNIKVDVEKYPGAVSAEGEKVTETISLYSNPTKWFAGNMQSTGLWAPAQKEVTIESSASVPVTVTVALADDLTGREKHEVALNRPPKVTKTYDLKANDKVTFKVPYGGLIYIKGNSPKNESAEFTFTGVVKAPFYKDGEWKNALNSPAPLGELESDAFVYTTPKKNLEASNFTGGVAEFAKDLDTFASSMNDFYGRNDEDGKHRMFTYKNLTGHKHRFTNDVQISIGDAHSGYPVMNSSFSTNSTTLPTTPLNDWLIWHAVGHNAAETPLTVPGATEVANNVLALYMQDRYLGKMNRVADDITVAPEYLEESNGQAWARGGAGDRLLMYAQLKEWAEKNFDIKQWYPEGDLPKFYSDREGMKGWNLFQLMHRKARGDDVGKTKFGERNYCAESNGNAADKLMLCASWVAQTDLSEFFKKWNPGANAYQLPGASEMNFEGGVSQSAYETLAALNLPKPQQGPETINQVTEHKMSAE

SEQ ID NO: 75 - protein, 1497 aa, Escherichia coli
CDGGGSGSSSDTPPVDSGTGSLPEVKPDPTPNPEPTPEPTPDPEPTPEPIPDPEPTPEPEPEPVPTKTGYLTLGGSQRVTGATCNGESSDGFTFTPGEDVTCVAGNTTIATFNTQSEAARSLRAVEKVSFSLEDAQELAASDNKKSNAVSLVTSSNSCPADTEQVCLTFSSVIESKRFDSLYKQIDLAPEEFKKLVNEEVENNAATDKAPSTHTSPVVPVTTPGTKPDLNASFVSANAEQFYQYQPTEIILSEGRLVDSQGYGVAGVNYYTNSGRGVTGENGEFSFSWGETISFGIDTFELGSVRGNKSTIALTELGDEVRGANIDQLIHRYSTTGQNNTRVVPDDVRKVFAEYPNVINEIINLSLSNGATLDEGEQVVNLPNEFIEQFKTGQAKEIDTAICAKTDGCNEARWFSLTTRNVNDGQIQGVINKLWGVDTSYKSVSKFHVFHDSTNFYGSTGNARGQAVVNISNAAFPILMARNDKNYWLAFGEKRAWDKNELAYITEAPSIVRPENVTRETATFNLPFISLGQVGKGKLMVIGNPHYNSILRCPNGYSWEGGVDKNGQCTRNSDSNDMKHFMQNVLRYLSNDKWTPDAKASMTVGTNLDTVYFKRHGQVTGNSAEFGFHPDFAGISVEHLSSYGDLDPQKMPLLILNGFEYVTQVGGDPYAVPLRADTSKPKLTQQDVTDLIAYMNKGGSVLIMENVMSNLKEESASGFVRLLDAAGLSMALNKSVVNNDPQGYPDRVRQRRATGIWVYERYPVVEGELPYTIDSKTGKVTWKYQIDNKPDKKPKLEVASWQEEVDGKQVTQFAFIDEADHKTTESLDAAKKKILEKFKGLEECKDSTYHYEINCLEYRPGTNVPVTGGMYVPRYTQLNLSADTAKAMVQAADLGTNIQRLYQHELYFRTNGRKGERLSSVDLERLYQNMSVWLWNEIEYSYDSSKEDELGFKTFTEFLNCYANDAYTGGTQCSDELKKSLVDNNMIYGEKSVNKAGMMNPSYPLNYMEKPLTRLMLGRSWWDLNIKVDVEKYPGAVSAEGEKVTETISLYSNPTKWFAGNMQSTGLWAPAQKEVTIESSASVPVTVTVALADDLTGREKHEVALNRPPKVTKTYDLKANDKVTFKVPYGGLIYIKGNSPKNESAEFTFTGVVKAPFYKDGEWKNALNSPAPLGELESDAFVYTTPKKNLEASNFTGGVAEFAKDLDTFASSMNDFYGRNDEDGKHRMFTYKNLTGHKHRFTNDVQISIGDAHSGYPVMNSSFSTNSTTLPTTPLNDWLIWHAVGHNAAETPLTVPGATEVANNVLALYMQDRYLGKMNRVADDITVAPEYLEESNGQAWARGGAGDRLLMYAQLKEWAEKNFDIKTWYPDGNLPAFYSEREGMKGWNLFQLMHRKARGDEVGKTKFGERNYCAESNGNAADTLMLCASWVAQTDLSEFFKKWNPGANAYQLPGASEMNFEGGVSQSAYETLAALNLPKPQQGPETINQVTEHKMSAE

SEQ ID NO: 76 - protein, 1497 aa, Escherichia coli; identical to SEQ ID NO: 58

SEQ ID NO: 77 - protein, 1270 aa, Escherichia coli
DTPSVDSGSGTLPEVKPDPTPTPEPTPEPTPDPEPTPDPTPDPEPTPEPEPEPVPTKTGYLTLGGSQRVTGATCNGESSDGFTFTPGNTVSCVVGSTTIATFNTQSEAARSLRAVDKVSFSLEDAQELANSENKKTNAISLVTSSDSCPADAEQLCLTFSSVVDRARFEKLYKQIDLATDNFSKLVNEEVENNAATDKAPSTHTSTVVPVTTEGTKPDLNASFVSANAEQFYQYQPTEIILSEGQLVDSLGNGVAGVDYYTNSGRGVTDENGKFSFSWGETISFGIDTFELGSVRGNKSTIALTELGDEVRGANIDQLIHRYSTTGQNNTRVVPDDVRKVFAEYPNVINEIINLSLSNGATLDEGDQNVVLPNEFIEQFKTGQAKEIDTAICAKTDGCNEARWFSLTTRNVNDGQIQGVINKLWGVDTNYQSVSKFHVFHDSTNFYGSTGNARGQAVVNISNSAFPILMARNDKNYWLAFGEKRAWDKNELAYITEAPSIVQPENVTRDTATFNLPFISLGQVGEGKLMVIGNPHYNSILRCPNGYSWGGGVNSKGECTLSGDSDDMKHFMQNVLRYLSNDIWQPNTKSIMTVGTNLENVYFKKAGQVLGNSAPFAFHEDFTGITVKQLTSYGDLNPEEIPLLILNGFEYVTQWSGDPYAVPLRADTSKPKLTQQDVTDLIAYLNKGGSVLIMENVMSNLKEESASSFVRLLDAAGLSMALNKSVVNNDPQGYPDRVRQRRATGIWVYERYPAADGAQPPYTIDPNTGEVTWKYQQDNKPDDKPKLEVASWQEEVEGKQVTRYAFIDEAEYTTEESLEAAKAKIFEKFPGLQECKDSTYHYEINCLERRPGTDVPVTGGMYVPRYTQLNLDADTAKAMVQAADLGTNIQRLYQHELYFRTKGSKGERLNSVDLERLYQNMSVWLWNDTKYRYEEGKEDELGFKTFTEFLNCYANDAYAGGTKCSADLKKSLVDNNMIYGDGSSKAGMMNPSYPLNYMEKPLTRLMLGRSWWDLNIKVDVEKYPGSVSAKGESVTENISLYSNPTKWFAGNMQSTGLWAPAQQDVTIKSSASVPVTVTVALADDLTGREKHEVALNRPPRVTKTYTLEANGEVTFKVPYGGLIYIKGDSKDDVSANFTFTGVVKAPFYKDGEWKNDLDSPAPLGELESASFVYTTPKKNLEASNFTGGVAEFAKDLDTFASSMNDFYGRNDEDGKHRMFTYKNLTGHKHRFTNDVQISIGDAHSGYPVMNSSFSTNSTTLPTTPLNDWLIW

SEQ ID NO: 78 - protein, 1270 aa, Escherichia coli
TPPVDSGTGSLPEVKPDPTPNPEPTPEPTPDPEPTPEPTPDPEPTPEPEPEPVPTKTGYLTLGGSQRITGATCNGESSDGFTFTPGDKVTCVAGNNTTIATFDTQSEAARSLRAVEKVSFSLEDAQELAASDDKKSNAVSLVTSSNSCPANTEQVCLTFSSVIESKRFDSLYKQIDLAPEEFKKLVNEEVENNAATDKAPSTHTSPVVPVTTPGTKPDLNASFVSANAEQFYQYQPTEIILSEGRLVDSMGNGVVGVNYYTSSGRGVTGENGKFNFSWGETISFGIDTFELGSVRGNKSTIALTELGDEVRGANIDQLIHRYSQAGKNDEREVPDVVRKVFAEYPNVINEIINLSLSNGEALSEGDQTFERTNEFLEQFESGQAKEIDTAICDSLGGCNSQRWFSLTARNVNEGQIQGVINKLWGVDKDYKSVTKFHVFHDSTNFYGSTGNARGQAVVNISNAAFPILMARNDKNYWLAFGEKRAWDKNELAYITEAPSLVEPENVTRDTATFNLPFISLGQVGEGKLMVIGNPHYNSILRCPNGYSWEGGVDKNGQCTRNSDSNDMKHFMQNVLRYLSDDKWTPDAKASMTVGTNLDTVYFKRHGQVTGNSAEFGFHPDFAGISVEHLSSYGDLDPQEMPLLILNGFEYVTQVGNDPYAIPLRADTSKPKLTQQDVTDLIAYLNKGGSVLIMENVMSNLKEESASGFVRLLDAAGLSMALNKSVVNNDPQGYPNRVRQQRATGIWVYERYPAVDGALPYTIDSKTGEVKWKYQVENKPDDKPKLEVASWLEDVDGKQETRYAFIDEADHKTEDSLKAAKAKIFEKFPGLKECKDPTYHYEVNCLEYRPGTGVPVTGGMYVPQYTQLSLNADTAKAMVQAADLGTNIQRLYQHELYFRTNGRKGERLSSVDLERLYQNMSVWLWNKIEYRYENDKDDELGFKTFTEFLNCYANDAYTGGTQCSDELKKSLVDNNMIYGEKSVNKAGMMNPSYPLNYMEKPLTRLMLGRSWWDLNIKVDVEKYPGAVSAEGEKVTETISLYSNPTKWFAGNMQSTGLWAPAQKEVTIESSASVPVTVTVALADDLTGREKHEVALNRPPKVTKTYELKANGEVKFTVPYGGLIYIKGNSPQNESAEFTFTGVVKAPFYKDGAWKNALNSPAPLGELESDAFVYTTPKKNLEASNFTGGVAEFAKDLDTFASSMNDFYGRNDEDGKHRMFTYKNLTGHKHRFTNDVQISIGDAHSGYPVMNSSFSTNSTTLPTTPLNDWLIW

SEQ ID NO: 79 - protein, 1271 aa, Escherichia coli
DTPPVDSGTGSLPEVKPDPTPNPEPTPEPTPDPEPTPEPTPDPEPTPEPEPEPVPTKTGYLTLGGSQRITGATCNGESSDGFTFTPGDKVTCVAGNNTTIATFDTQSEAARSLRAVEKVSFSLEDAQELAASDDKKSNAVSLVTSSNSCPADTEQVCLTFSSVIESKRFDSLYKQIDLAPEEFKKLVNEEVENNAATDKAPSTHTSPVVPVTTPGTKPDLNASFVSANAEQFYQYQPTEIILSEGRLVDSMGNGVVGVNYYTSSGRGVTGENGKFNFSWGETISFGIDTFELGSVRGNKSTIALTELGDEVRGANIDQLIHRYSQAGKNDEREVPDVVRKVFAEYPNVINEIINLSLSNGEALSEGDQTFERTNEFLEQFESGQAKEIDTAICDSLGGCNSQRWFSLTARNVNDGQIQGVINKLWGVDTNYKSVSKFHVFHDSTNFYGSTGNARGQAVVNISNAAFPILMARNDKNYWLAFGEKRAWDKNELAYITEAPSLVEPENVTRDTATFNLPFISLGQVGEGKLMVIGNPHYNSILRCPNGYSWEGGVDKNGQCTRNSDSNDMKHFMQNVLRYLSDDKWTPDAKASMTVGTNLDTVYFKRHGQVTGNSAEFGFHPDFAGISVEHLSSYGDLDPQEMPLLILNGFEYVTQVGNDPYAIPLRADTSKPKLTQQDVTDLIAYLNKGGSVLIMENVMSNLKEESASGFVRLLDAAGLSMALNKSVVNNDPQGYPNRVRQQRATGIWVYERYPAVDGALPYTIDSKTGEVKWKYQVENKPDDKPKLEVASWLEDVDGKQETRYAFIDEADHKTEDSLKAAKAKIFEKFPGLKECKDPTYHYEVNCLEYRPGTGVPVTGGMYVPQYTQLSLNADTAKAMVQAADLGTNIQRLYQHELYFRTNGRKGERLSSVDLERLYQNMSVWLWNKIEYRYENDKDDELGFKTFTEFLNCYANDAYTGGTQCSDELKKSLVDNNMIYGEKSVNKAGMMNPSYPLNYMEKPLTRLMLGRSWWDLNIKVDVEKYPGAVSAEGEKVTETISLYSNPTKWFAGNMQSTGLWAPAQKEVTIESTASVAVTVTVALADDLTGREKHEVALNRPPKVTKTYELKANGEVKFTVPYGGLIYIKGNSPQNESAEFTFTGVVKAPFYKDGAWKNALNSPAPLGELESDAFVYTTPKKNLEASNYKGGQEQFAEELDTFASSMNDFYGRNDEDGKHRMFTYKNLTGHKHRFTNDVQISIGDAHSGYPVMNSSFSTNSTTLPTTPLNDWLIW

SEQ ID NO: 80 - protein, 1269 aa, Escherichia coli
DTPPVDSGTGSLPEVKPDPTPNPEPTPEPTPDPEPTPEPIPDPEPTPEPEPEPVPTKTGYLTLGGSQRVTGATCNGESSDGFTFKPGEDVTCVAGNTTIATFNTQSEAARSLRAVEKVSFSLEDAQELAGSDDKKSNAVSLVTSSNSCPANTEQVCLTFSSVIESKRFDSLYKQIDLAPEEFKKLVNEEVENNAATDKAPSTHTSPVVPVTTPGTKPDLNASFVSANAEQFYQYQPTEIILSEGRLVDSQGYGVAGVNYYTNSGRGVTGENGEFSFSWGETISFGIDTFELGSVRGNKSTIALTELGDEVRGANIDQLIHRYSTTGQNNTRVVPDDVRKVFAEYPNVINEIINLSLSNGATLGEGEQVVNLPNEFIEQFNTGQAKEIDTAICAKTDGCNEARWFSLTTRNVNDGQIQGVINKLWGVDTNYKSVSKFHVFHDSTNFYGSTGNARGQAVVNISNAAFPILMARNDKNYWLAFGEKRAWDKNELAYITEAPSLVEPENVTRDTATFNLPFISLGQVGEGKLMVIGNPHYNSILRCPNGYSWNGGVNKDGQCTLNSDPDDMKNFMENVLRYLSDDKWKPDAKASMTVGTNLDTVYFKRHGQVTGNSAAFDFHPDFAGISVEHLSSYGDLDPQEMPLLILNGFEYVTQVGNDPYAIPLRADTSKPKLTQQDVTDLIAYLNKGGSVLIMENVMSNLKEESASGFVRLLDAAGLSMALNKSVVNNDPQGYPNRVRQQRATGIWVYERYPAVDGALPYTIDSKTGEVKWKYQVENKPDDKPKLEVASWLEDVDGKQETRYAFIDEADHKTEDSLKAAKEKIFAAFPGLKECTNPAYHYEVNCLEYRPGTGVPVTGGMYVPQYTQLSLNADTAKAMVQAADLGTNIQRLYQHELYFRTNGRKGERLSSVDLERLYQNMSVWLWNDTSYRYEEGKNDELGFKTFTEFLNCYANDAYAGGTKCSADLKKSLVDNNMIYGDGSSKAGMMNPSYPLNYMEKPLTRLMLGRSWWDLNIKVDVEKYPGAVSEEGQNVTETISLYSNPTKWFAGNMQSTGLWAPAQKEVTIKSNANVPVTVTVALADDLTGREKHEVALNRPPRVTKTYSLDASGTVKFKVPYGGLIYIKGNSSTNESASFTFTGVVKAPFYKDGAWKNDLNSPAPLGELESDAFVYTTPKKNLNASNYTGGLEQFANDLDTFASSMNDFHGRDSEDGKHRMFTYKNLPGHKHRFTNDVQISIGDAHSGYPVMNSSFSPNSTTLPTTPLNDWLIW

SEQ ID NO: 81 - protein, 1271 aa, Escherichia coli
DTPPVDSGTGSLPEVKPDPTPNPEPTPEPTPDPEPTPEPTPDPEPTPEPEPEPVPTKTGYLTLGGSLRVTGDITCNDESSDGFTFTPGDKVTCVAGNNTTIATFDTQSEAARSLRAVEKVSFSLEDAQELAGSDNKKSNALSLVTSMNSCPANTEQVCLEFSSVIESKRFDSLYKQIDLAPEEFKKLVNEEVENNAATDKAPSTHTSPVVPVTTPGTKPDLNASFVSANAEQFYQYQPSEIILSEGRLVDSQGYGVAGVNYYTNSGRGVTGENGEFSFSWGETISFGIDTFELGSVRGNKSTIALTELGDEVRGANIDQLIHRYSTTGQNNTRVVPDDVRKVFAEYPNVINEIINLSLSNGATLDEGEQVVNLPNEFIEQFKTGQAKEIDTAICAKTDGCNEARWFSLTTRNVNDGQIQGVINKLWGVDTNYKSVSKFHVFHDSTNFYGSTGNARGQAVVNISNAAFPILMARNDKNYWLAFGEKRAWDKNELAYITEAPSLVEPENVTRDTATFNLPFISLGQVGEGKLMVIGNPHYNSILRCPNGYSWNGGVNKDGQCTLNSDPDDMKNFMENVLRYLSDDKWTPDAKASMTVGTNLDTVYFKRHGQVTGNSAAFDFHPDFAGISVEHLSSYGDLDPQEMPLLILNGFEYVTQVGNDPYAIPLRADTSKPKLTQQDVTDLIAYLNKGGSVLIMENVMSNLKEESASGFVRLLDAAGLSMALNKSVVNNDPQGYPNRVRQQRATGIWVYERYPAVDGALPYTIDSKTGEVKWKYQVENKPDDKPKLEVASWLEDVDGKQETRYAFIDEADHKTEDSLKAAKEKIFAAFPGLKECTNPAYHYEVNCLEYRPGTGVPVTGGMYVPQYTQLSLNADTAKAMVQAADLGTNIQRLYQHELYFRTNGRKGERLSCVDLERLYQNMSVWLWNDTSYRYEEGKNDELGFKTFTEFLNCYANDAYAGGTKCSADLKKSLVDNNMIYGDGSSKAGMMNPSYPLNYMEKPLTRLMLGRSWWDLNIKVDVEKYPGAVSEEGQNVTETISLYSNPTKWFAGNMQSTGLWAPAQKEVTIKSNANVPVTVTVALADDLTGREKHEVALNRPPRVTKTYSLDASGTVKFKVPYGGLIYIKGNSSTNESASFTFTGVVKAPFYKDGAWKNDLNSPAPLGELESDAFVYTTPKKNLNASNYTGGLEQFANDLDTFASSMNDFYGRDSEDGKHRMFTYKNLPGHKHRFANDVQISIGDAHSGYPVMNSSFSPNSTTLPTTPLNDWLIW

SEQ ID NO: 82 - protein, 1270 aa, Escherichia coli
DTPPVDSGTGSLPEVKPDPTPNPEPTPEPTPDPEPTPEPTPDPEPTPEPEPEPVPTKTGYLTLGGSLRVTGDITCNDESSDGFTFTPGDKVTCVAGNNTTIATFDTQSEAARSLRAVEKVSFSLEDAQELAGSDNKKSNALSLVTSMNSCPANTEQVCLEFSSVIESKRFDSLYKQIDLAPEEFKKLVNEEVENNAATDKAPSTHTSPVVPVTTPGTKPDLNASFVSANAEQFYQYQPSEIILSEGRLVDSQGYGVAGVNYYTNSGRGVTGENGEFSFSWGETISFGIDTFELGSVRGNKSTIALTELGDEVRGANIDQLIHRYSTTGQNNTRVVPDDVRKVFAEYPNVINEIINLSLSNGATLGEGEQVVNLPNEFIEQFKTGQAKEIDTAICAKTDGCNEARWFSLTTRNVNDGQIQGVINKLWGVDTNYKSVSKFHVFHDSTNFYGSTGNARGQAVVNISNAAFPILMARNDKNYWLAFGEKRAWDKNDLAYITEAPSIVRPENVTRETATFNLPFISLGQVGDGKLMVIGNPHYNSILRCPNGYSWNGGVNKDGQCTLNSDPDDMKNFMENVLRYLSNDRWLPDAKSSMTVGTNLDTVYFKKHGQVLGNSAPFAFHKDFTGITVKPMTSYGNLNPDEVPLLILNGFEYVTQWGSDPYSIPLRADTSKPKLTQQDVTDLIAYMNKGGSVLIMENVMSNLKEESASGFVRLLDAAGLSMALNKSVVNNDPQGYPDRVRQRRSTPIWVYERYPAVDGKPPYTIDDTTKEVIWKYQQENKPDDKPKLEVASWQEEVEGKQVTQFAFIDEADHKTPESLAAAKQRILDAFPGLEVCKDSDYHYEVNCLEYRPGSGVPVTGGMYVPQYTQLDLGADTAKAMLQAADLGTNIQRLYQHELYFRTNGRQGERLNSVDLERLYQNMSVWLWNETKYRYEEGKEDELGFKTFTEFLNCYTNNAYVGTQCSAELKKSLIDNKMIYGEESSKAGMMNPSYPLNYMEKPLTRLMLGRSWWDLNIKVDVEKYPGAVSEEGQNVTETISLYSNPTKWFAGNMQSTGLWAPAQKEVTIKSNANVPVTVTVALADDLTGREKHEVALNRPPRVTKTYSLDASGTVKFKVPYGGLIYIKGNSSTNESASFTFTGVVKAPFYKDGAWKNDLNSPAPLGELESDAFVYTTPKKNLNASNYTGGLEQFANDLDTFASSMNDFYGRDSESGKHRMFTYKNLTGHKHRFANDVQISIGDAHSGYPVMNSSFSPNSTTLPTTPLNDWLIW

SEQ ID NO: 83 - protein, 1271 aa, Escherichia coli
DTPPVDSGTGSLPEVKPDPTPNPEPTPEPTPDPEPTPEPTPDPEPTPEPEPEPVPTKTGYLTLGGSLRVTGDITCNDESSDGFTFTPGDKVTCVAGNNTTIATFDTQSEAARSLRAVEKVSFSLEDAQELAGSDNKKSNALSLVTSMNSCPANTEQVCLEFSSVIESKRFDSLYKQIDLAPEEFKKLVNEEVENNAATDKAPSTHTSPVVPVTTPGTKPDLNASFVSANAEQFYQYQPSEIILSEGRLVDSQGYGVAGVNYYTNSGRGVTGENGEFSFSWGETISFGIDTFELGSVRGNKSTIALTELGDEVRGANIDQLIHRYSTTGQNNTRVVPDDVRKVFAEYPNVINEIINLSLSNGATLDEGEQVVNLPNEFIEQFKTGQAKEIDTAICAKTDGCNEARWFSLTTRNVNDGQIQGVINKLWGVDTNYKSVSKFHVFHDSTNFYGSTGNARGQAVVNISNAAFPILMARNDKNYWLAFGEKRAWDKNELAYITEAPSLVEPENVTRDTATFNLPFISLGQVGEGKLMVIGNPHYNSILRCPNGYSWNGGVNKDGQCTLNSDPDDMKNFMENVLRYLSDDKWTPDAKASMTVGTNLDTVYFKRHGQVTGNSAAFDFHPDFAGISVEHLSSYGDLDPQEMPLLILNGFEYVTQVGNDPYAIPLRADTSKPKLTQQDVTDLIAYLNKGGSVLIMENVMSNLKEESASGFVRLLDAAGLSMALNKSVVNNDPQGYPNRVRQQRATGIWVYERYPAVDGALPYTIDSKTGEVKWKYQVENKPDDKPKLEVASWLEDVDGKQETRYAFIDEADHKTEDSLKAAKEKIFAAFPGLKECTNPAYHYEVNCLEYRPGTGVPVTGGMYVPQYTQLSLNADTAKAMVQAADLGTNIQRLYQHELYFRTNGRKGERLSSVDLERLYQNMSVWLWNDTSYRYEEGKNDELGFKTFTEFLNCYANDAYAGGTKCSADLKKSLVDNNMIYGDGSSKAGMMNPSYPLNYMEKPLTRLMLGRSWWDLNIKVDVEKYPGAVSEEGQNVTETISLYSNPTKWFAGNMQSTGLWAPAQKEVTIKSNANVPVTVTVALADDLTGREKHEVALNRPPRVTKTYSLDASGTVKFKVPYGGLIYIKGNSSTNESASFTFTGVVKAPFYKDGAWKNDLNSPAPLGELESDAFVYTTPKKNLNASNYTGGLEQFANDLDTFASSMNDFYGRDETSGKHRMFTYKNLTGHKHRFTNDVQISIGDAHSGYPVMNSSFSTNSTTLPTTPLNDWLIW

SEQ ID NO: 84 - protein, 1270 aa, Escherichia coli
DTPPVDSGTGSLPEVKPDPTPNPEPTPEPTPDPEPTPEPTPDPEPTPEPEPEPVPTKTGYLTLGGSLRVTGDITCNDESSDGFTFTPGDKVTCVAGNNTTIATFDTQSEAARSLRAVEKVSFSLEDAQELAGSDNKKSNALSLVTSMNSCPANTEQVCLEFSSVIESKRFDSLYKQIDLAPEEFKKLVNEEVENNAATDKAPSTHTSPVVPATTPGTKPDLNASFVSANAEQFYQYQPTEIILSEGRLVDSQGDGVVGVNYYTNSGRGVTGENGEFSFSWGETISFGIDTFELGSVRGNKSTIALTELGDEVRGANIDQLIHRYSKAGQNHTRVVPDEVRKVFAEYPNVINEIINLSLSNGATLGEGEQVVNLPNEFIEQFKTGQAKEIDTAICAKTDGCNEARWFSLTTRNVNDGKIQGVINKLWGVDTNYKSVSKFHVFHDSTNFYGSTGNARGQAVVNISNAAFPILMARNDKNYWLAFGEKRAWDKNELAYITEAPSIVRPENVTRETATFNLPFISLGQVGDGKLMVIGNPHYNSILRCPNGYSWNGGVNKDGQCTLNSDPDDMKNFMENVLRYLSDDKWTPDAKASMTVGTNLDTVYFKRHGQVTGNSAAFDFHPDFAGISVEHLSSYGDLDPQEMPLLILNGFEYVTQVGNDPYAIPLRADTSKPKLTQQDVTDLIAYLNKGGSVLIMENVMSNLKEESASGFVRLLDAAGLSMALNKSVVNNDPQGYPNRVRQRRSTPIWVYERYPAVDGKPPYTIDDTTKEVIWKYQQENKPDDKPKLEVASWQEEVEGKQVTQFAFIDEADHKTPESLAAAKQRILDAFPGLEVCKDSDYHYEVNCLEYRPGTDVPVTGGMYVPQYTQLDLSADTAKAMLQAADLGTNIQRLYQHELYFRTNGRQGERLNSVDLERLYQNMSVWLWNETKYRYEEGKEDELGFKTFTEFLNCYTNNAYVGTQCSAELKKSLIDNKMIYGEESSKAGMMNPSYPLNYMEKPLTRLMLGRSWWDLNIKVDVEKYPGVVNTNGETVTQNINLYSAPTKWFAGNMQSTGLWAPAQQEVSIESKATVPVTVTVALADDLTGREKHEVSLNRPPRVTKTYDLKANDKVTFKVPYGGLIYIKGDSKEVQSADFTFTGVVKAPFYKDGKWQHDLNSPAPLGELESASFVYTTPKKNLNASNYTGGLEQFANDLDTFASSMNDFYGRDSEDGKHRMFTYKNLPGHKHRFANDVQISIGDAHSGYPVMNSSFSPNSTTLPTTPLNDWLIW

SEQ ID NO: 85 - protein, 1270 aa, Escherichia coli
DTPSVDSGSGTLPEVKPDPTPTPEPTPEPTPDPEPTPDPTPDPDPEPTPEPEPEPVPTKTGYLTLGGSQRVTGATCNGESSDGFTFTPGNTVSCVVGSTTIATFNTQSEAARSLRAVDKVSFSLEDAQELANSENKKTNAISLVTSSDSCPADAEQLCLTFSSVVDRARFEKLYKQIDLATDNFSKLVNEEVENNAATDKAPSTHTSTVVPVTTEGTKPDLNASFVSANAEQFYQYQPTEIILSEGQLVDSLGNGVAGVDYYTNSGRGVTDENGKFSFSWGETISFGIDTFELGSVRGNKSTIALTELGDEVRGANIDQLIHRYSTTGQNNTRVVPDDVRKVFAEYPNVINEIINLSLSNGATLDEGDQNVVLPNEFIEQFKTGQAKEIDTAICAKTNGCNEARWFSLTTRNVNDGQIQGVINKLWGVDTNYQSVSKFHVFHDSTNFYGSTGNARGQAVVNISNAAFPILMARNDKNYWLAFGEKRAWDKNELAYITEAPSIVQPENVTRDTATFNLPFISLGQVGDGKLMVIGNPHYNSILRCPNGYSWGGGVNSKGECTLSGDSDDMKHFMQNVLRYLSNDIWQPNTKSIMTVGTNLENVYFKKAGQVLGNSAPFAFHEDFTGITVKQLTSYGDLNPEEIPLLILNGFEYVTQWSGDPYAVPLRADTSKPKLTQQDVTDLIAYLNKGGSVLIMENVMSNLKEESASSFVRLLDAAGLSMALNKSVVNNDPQGYPDRVRQQREKGIWVYERYPFVDGKPPYTIDETTKEVIWKYQQDNKPDDKPKLEVASWLEDVDGKQVKRYAFIDEAEHETNESLEAAKAKIIKAFPGLEECKDPTYHYEVNCLEYRPGTNVPVTGGMYVPRYTQLNLSADTAKAMVQAADLGTNIQRLYQHELYFRTNGRKGERLSSVDLERLYQNMSVWLWNEIEYSYDSSKEDELGFKTFTEFLNCYANDAYTKGTLCSAELKQSLIDNKMIYGEGSKAGMMNPSYPLNYMEKPLTRLMLGRSWWDLNIKVDVEKYPGAVSVGGEEVTETISLYSNPTKWFAGNMQSTGLWAPAQKEVTIKSNANVPVTVTVALADDLTGREKHEVALNRPPRVTKTYSLDASGTVKFKVPYGGLIYIKGNSSTNESASFTFTGVVKAPFYKDGAWKNDLNSPAPLGELESASFVYTTPKKNLNASNYTGGLDQFAKDLDTFASSMNDFYGRNDEDGKHRMFTYKNLTGHKHRFTNDVQISIGDAHSGYPVMNSSFSTNSTTLPTTPLNDWLIW

SEQ ID NO: 86 - protein, 1268 aa, Escherichia coli
DTPPVDSGTGSLPEVKPDPTPNPEPTPEPTPDPEPTPEPIPDPEPTPEPEPEPVPTKTGYLTLGGSQRVTGATCNGESSDGFTFKPGEDVTCVAGNTTIATFNTQSEAARSLRAVEKVSFSLEDAQELAGSDDKKSNAVSLVTSSNSCPANTEQVCLTFSSVIESKRFDSLYKQIDLAPEEFKKLVNEEVENNAATDKAPSTHTSPVVPVTTPGTKPDLNASFVSANAEQFYQYQPTEIILSEGRLVDSQGYGVAGVNYYTNSGRGVTGENGEFSFSWGEAISFGIDTFELGSVRGNKSTIALTELGDEVRGANIDQLIHRYSTTGQNNTRVVPDDVRKVFAEYPNVINEIINLSLSNGATLGEGEQVVNLPNEFIEQFNTGQAKEIDTAICAKTDGCNEARWFSLTTRNVNDGQIQGVINKLWGVDTNYKSVSKFHVFHDSTNFYGSTGNARGQAVVNISNAAFPILMARNDKNYWLAFGEKRAWDKNELAYITEAPSIVRPENVTRETASFNLPFISLGQVGDGKLMVIGNPHYNSILRCPNGYSWNGGVNKDGQCTLNSDPDDMKNFMENVLRYLSNDRWLPDAKSSMTVGTNLETVYFKKHGQVLGNSAPFAFHKDFTGITVKPMTSYGNLNPDEVPLLILNGFEYVTQWGSDPYSIPLRADTSKPKLTQQDVTDLIAYMNKGGSVLIMENVMSNLKEESASGFVRLLDAAGLSMALNKSVVNNDPQGYPDRVRQRRSTPIWVYERYPAVDGKPPYTIDDTTKEVIWKYQQENKPDDKPKLEVASWQEEVEGKQVTQFAFIDEADHKTPESLAAAKQRILDAFPGLEVCKDSDYHYEVNCLEYRPGTDVPVTGGMYVPQYTQLDLSADTAKAMLQAADLGTNIQRLYQHELYFRTNGRQGERLNSVDLERLYQNMSVWLWNETKYRYEEGKEDELGFKTFTEFLNCYTNNAYVGTQCSAELKKSLIDNKMIYGEESSKAGMMNPSYPLNYMEKPLTRLMLGRSWWDLNIKVDVEKYPGVVNTNGETVTQNINLYSAPTKWFAGNMQSTGLWAPAQQEVSIESKSTVPVTVTVALADDLTGREKHEVSLNRPPRVTKTYDLKANDKVTFKVPYGGLIYIKGDSKEVQSADFTFTGVVKAPFYKDGKWQHDLNSPAPLGELESASFVYTTPKKNLNASNYTGGLEQFANDLDTFASSMNDFYGRDSEDGKHRMFTYKNLPGHKHRFANDVQISIGDAHSGYPVMNSSFSPNSTTLPTTPLNDWLIW

SEQ ID NO: 87 - protein, 1272 aa, Escherichia coli
DTPPVDSGTGSLPEVKPDPTPNPEPTPEPTPDPEPTPEPTPDPEPTPEPEPEPVPTKTGYLTLGGSQRITGATCNGESSDGFTFTPGDKVTCVAGNNTTIATFDTQSEAARSLRAVEKVSFSLEDAQELAASDDKKSNAVSLVTSSNSCPANTEQVCLTFSSVIESKRFDSLYKQIDLAPEEFKKLVNEEVENNAATDKAPSTHTSPVVPVTTPGTKPDLNASFVSANAEQFYQYQPTEIILSEGRLVDSMGNGVVGVNYYTSSGRGVTGENGKFNFSWGETISFGIDTFELGSVRGNKSTIALTELGDEVRGANIDQLIHRYSQAGKNDEREVPDVVRKVFAAYPNVINEIINLSLSNGEALSEGDQTFERTNEFLEQFESGQAKEIDTAICDSLGGCNSQRWFSLTARNVNEGQIQGVINKLWGVDKDYKSVTKFHVFHDSTNFYGSTGNARGQAVVNISNAAFPILMARNDKNYWLAFGEKRAWDKNELAYITEAPSLVEPENVTRDTATFNLPFISLGQVGEGKLMVIGNPHYNSILRCPNGYSWEGGVDKNGQCTRNSDSNDMKHFMQNVLRYLSNDKWTPDAKASMTVGTNLDTVYFKRHGQVTGNSAEFGFHPDFAGISVEHLSSYGDLDPQKMPLLILNGFEYVTQVGGDPYAVPLRADTSKPKLSQQDVTDLIAYLNKGGSVLIMENVMSNLKEESASGFVRLLDAAGLSMALNKSVVNNDPQGYPDRVRQRRATGIWVYERYPVVEGELPYTIDSKTGKVTWKYQIDNKPDKKPKLEVASWQEEVDGKQVTQFAFIDEADHKTTESLDAAKKKILEKFKGLEECKDSTYHYEINCLEYRPGTNVPATGGMYVPRYTQLNLSADTAKAMVQAADLGTNIQRLYQHELYFRTNGRKGERLSSVDLERLYQNMSVWLWNEIEYSYDSSKEDELGFKTFTEFLNCYANDAYTGGTQCSDELKKSLVDNNMIYGEKSVNKAGMMNPSYPLNYMEKPLTRLMLGRSWWDLNIKVDVEKYPGAVSEEGQEVTESISLYSNPTKWFAGNMQSTGLWAPAQKEVTIKSNADVPVTVTVALADDLTGREKHEVALNRPPKVTKTYELKANGEVKFTVPYGGLIYIKGNSKENNKSASFTFTGVVKAPFYKNGAWKNALNSPAPLGELESDAFVYTTPKKNLEASNFTGGVAEFAKDLDTFASSMNDFYGRNDEDGKHRMFTYKNLTGHKHRFTNDVQISIGDAHSGYPVMNSSFSTNSTTLPTTPLNDWLIW

SEQ ID NO: 88 - protein, 1268 aa, Escherichia coli
DTPPVDSGTGSLPEVKPDPTPNPEPTPEPTPDPEPTPEPIPDPEPTPEPEPEPVPTKTGYLTLGGSQRVTGATCNGESSDGFTFKPGEDVTCVAGNTTIATFNTQSEAARSLRAVEKVSFSLEDAQELAGSDDKKSNAVSLVTSSNSCPANTEQVCLTFSSVIESKRFDSLYKQIDLAPEEFKKLVNEEVENNAATDKAPSTHTSPVVPVTTPGTKPDLNASFVSANAEQFYQYQPTEIILSEGRLVDSQGYGVAGVNYYTNSGRGVTGENGEFSFSWGETISFGIDTFELGSVRGNKSTIALTELGDEVRGANIDQLIHRYSTTGQNNTRVVPDDVRKVFAEYPNVINEIINLSLSNGATLGEGEQVVNLPNEFIEQFNTGQAKEIDTAICAKTDGCNEARWFSLTTRNVNDGQIQGVINKLWGVDTNYKSVSKFHVFHDSTNFYGSTGNARGQAVVNISNAAFPILMARNDKNYWLAFGEKRAWDKNELAYITEAPSIVRPENVTRETATFNLPFISLGQVGDGKLMVIGNPHYNSILRCPNGYSWNGGVNKDGQCTLNSDPDDMKNFMENVLRYLSNDRWLPDAKSNMTVGTNLDTVYFKKHGQVTGNSAAFGFHPDFAGISVEHLSSYGDLDPQEMPLLILNGFEYVTQVGNDPYAIPLRADTSKPKLTQQDVTDLIAYMNKGGSVLIMENVMSNLKEESASGFVRLLDAAGLSMALNKSVVNNDPQGYPDRVRQRRSTPIWVYERYPAVDGKPPYTIDDTTKEVIWKYQQENKPDDKPKLEVASWQEEVEGKQVTQFAFIDEADHKTPESLAAAKKRILDAFPGLEECKDSDYHYEVNCLEYRPGTGVPVTGGMYVPQYTQLSLNADTAKAMVQAADLGTNIQRLYQHELYFRTNGRKGERLSSVDLERLYQNMSVWLWNKIEYRYENDKDDELGFKTFTEFLNCYANNAYDGGTQCSAELKQSLIDNKMIYGEGSKAGMMNPSYPLNYMEKPLTRLMLGRSWWDLNIKVDVEKYPGAVSAEGEEVTETINLYSNPTKWFAGNMQSTGLWAPAQQEVSIKSNAKVPVTVTVALADDLTGREKHEVALNRPPRVTKTYSLDASGTVKFKVPYGGLIYIKSDSKEEKSANFTFTGVVKAPFYKDGKWKNDLKSPAPLGELESASFVYTTPKKNLEASNYKGGLKQFAEDLDTFASSMNDFYGRDGESGKHRMFTYEALTGHKHRFTNDVQISIGDAHSGYPVMNSSFSPNSTTLPTTPLNDWLIW

SEQ ID NO: 89 - protein, 1269 aa, Escherichia coli
DTPPVDSGTGSLPEVKPDPTPNPEPTPEPTPDPEPTPEPIPDPEPTPEPEPEPVPTKTGYLTLGGSQRVTGATCNGESSDGFTFKPGEDVTCVAGNTTIATFNTQSEAARSLRAVEKVSFSLEDAQELAGSDDKKSNAVSLVTSSNSCPANTEQVCLTFSSVIESKRFDSLYKQIDLAPEEFKKLVNEEVENNAATDKAPSTHTSPVVPVTTPGTKPDLNASFVSANAEQFYQYQPTEIILSEGRLVDSQGYGVAGVNYYTNSGRGVTGENGEFSFSWGETISFGIDTFELGSVRGNKSTIALTELGDEVRGANIDQLIHRYSTTGQNNTRVVPDDVRKVFAEYPNVINEIINLSLSNGATLGEGEQVVNLPNEFIEQFNTGQAKEIDTAICAKTDGCNEARWFSLTTRNVNDGQIQGVINKLWGVDTNYKSVSKFHVFHDSTNFYGSTGNARGQAVVNISNAAFPILMARNDKNYWLAFGEKRAWDKNELAYITEAPSLVEPENVTRDTATFNLPFISLGQVGEGKLMVIGNPHYNSILRCPNGYSWNGGVNKDGQCTLNSDPDDMKNFMENVLRYLSDDKWKPDAKASMTVGTNLDTVYFKRHGQVTGNSAAFDFHPDFAGISVEHLSSYGDLDPQEMPLLILNGFEYVTQVGNDPYAIPLRADTSKPKLTQQDVTDLIAYLNKGGSVLIMENVMSNLKEESASGFVRLLDAAGLSMALNKSVVNNDPQGYPNRVRQQRATGIWVYERYPAVDGALPYTIDSKTGEVKWKYQVENKPDDKPKLEVASWLEDVDGKQETRYAFIDEADHKTEDSLKAAKEKIFAAFPGLKECTNPAYHYEVNCLEYRPGTGVPVTGGMYVPQYTQLSLNADTAKAMVQAADLGTNIQRLYQHELYFRTNGRKGERLSSVDLERLYQNMSVWLWNDTSYRYEEGKNDELGFKTFTEFLNCYANDAYAGGTKCSADLKKSLVDNNMIYGDGSSKAGMMNPSYPLNYMEKPLTRLMLGRSWWDLNIKVDVEKYPGAVSEEGQNVTETISLYSNPTKWFAGNMQSTGLWAPAQKEVTIKSNANVPVTVTVALADDLTGREKHEVALNRPPRVTKTYSLDASGTVKFKVPYGGLIYIKGNSSTNESASFTFTGVVKAPFYKDGAWKNDLNSPAPLGELESDAFVYTTPKKNLNASNYTGGLEQFANDLDTFASSMNDFYGRDSEDGKHRMFTYKNLPGHKHRFTNDVQISIGDAHSGYPVMNSSFSPNSTTLPTTPLNDWLIW

SEQ ID NO: 90 - protein, 1268 aa, Escherichia coli
DTPPVDSGTGSLPEVKPDPTPNPEPTPEPTPDPEPTPEPIPDPEPTPEPEPEPVPTKTGYLTLGGSQRVTGATCNGESSDGFTFKPGEDVTCVAGNTTIATFNTQSEAARSLRAVEKVSFSLEDAQELAGSDDKKSNAVSLVTSSNSCPANTEQVCLTFSSVIESKRFDSLYKQIDLAPEEFKKLVNEEVENNAATDKAPSTHTSPVVPVTTPGTKPDLNASFVSANAEQFYQYQPTEIILSEGRLVDSQGYGVAGVNYYTNSGRGVTGENGEFSFSWGETISFGIDTFELGSVRGNKSTIALTELGDEVRGANIDQLIHRYSTTGQNNTRVVPEDVRKVFAEYPNVINEIINLSLSNGATLGEGEQVVNLPNEFIEQFNTGQAKEIDTAICAKTDGCNEARWFSLTTRNVNDGQIQGVINKLWGVDTNYKSVSKFHVFHDSTNFYGSTGNARGQAVVNISNAAFPILMARNDKNYWLAFGEKRAWDKNELAYITEAPSIVRPENVTRETATFNLPFISLGQVGDGKLMVIGNPHYNSILRCPNGYSWNGGVNKDGQCTLNSDPDDMKNFMENVLRYLSNDRWLPDAKSNMTVGTNLDTVYFKKHGQVTGNSAAFGFHPDFAGISVEHLSSYGDLDPQEMPLLILNGFEYVTQVGNDPYAIPLRADTSKPKLTQQDVTDLIAYMNKGGSVLIMENVMSNLKEESASGFVRLLDAAGLSMALNKSVVNNDPQGYPDRVRQRRSTPIWVYERYPAVDGKPPYTIDDTTKEVIWKYQQENKPDDKPKLEVASWQEEVEGKQVTQFAFIDEADHKTPESLAAAKKRILDAFPGLEECKDSDYHYEVNCLEYRPGTGVPVTGGMYVPQYTQLSLNADTAKAMVQAADLGTNIQRLYQHELYFRTNGRKGERLSSVDLERLYQNMSVWLWNKIEYRYENDKDDELGFKTFTEFLNCYANNAYDGGTQCSAELKQSLIDNKMIYGEGSKAGMMNPSYPLNYMEKPLTRLMLGRSWWDLNIKVDVEKYPGAVSAEGEEVTETINLYSNPTKWFAGNMQSTGLWAPAQQEVSIKSNAKVPVTVTVALADDLTGREKHEVALNRPPRVTKTYSLDASGTVKFKVPYGGLIYIKSDSKEEKSANFTFTGVVKAPFYKDGKWKNDLKSPAPLGELESASFVYTTPKKNLEASNYKGGLKQFAEDLDTFASSMNDFYGRDGESGKHRMFTYEALTGHKHRFTNDVQISIGDAHSGYPVMNSSFSPNSTTLPTTPLNDWLIW

SEQ ID NO: 91 - protein, 1274 aa, Escherichia coli
DTPPVDSGTGSLPEVKPDPTPNPEPTPEPTPDPEPTPDPTPDPEPTPEPEPEPVPTKTGYLTLGGSQRITGATCNGESSDGFTFTPGDKVTCVAGNNTTIATFDTQSEAARSLRAVEKVSFSLEDAQELAASDDKKSNAVSLVTSSNSCPADTEQVCLTFSSVIESKRFDSLYKQIDLAPEEFKKLVNEEVENNAATDKAPSTHTSPVVPVTTPGTKPDLNASFVSANAEQFYQYQPTEIILSEGRLVDSQGYGVAGVNYYTNSGRGVTGENGEFSFSWGETISFGIDTFELGSVRGNKSTIALTELGDEVRGANIDQLIHRYSTTGQNNTRVVPDDVRKVFAEYPNVINEIINLSLSNGATLDEGDQNVVLPNEFIEQFKTGQAKEIDTAICAKTDGCNEARWFSLTTRNVNDGQIQGVINKLWGVDKDYKSVTKFHVFHDSTNFYGSTGNARGQAVVNISNAAFPILMARNDKNYWLAFGEKRAWDKNELAYITEAPSIVQPENVTRDTATFNLPFISLGQVGEGKLMVIGNPHYNSILRCPNGYSWNGGVNKDGQCTLSGDSDDMKHFMQNVLRYLSDDKWTPDAKASMTVGTNLDTVYFKRHGQVTGNSAEFGFHPDFAGISVEHLSSYGDLDPQEMPLLILNGFEYVTQVGNDPYAIPLRADTSKPKLTQQDVTDLIAYLNKGGSVLIMENVMSNLKEESASGFVRLLDAAGLSMALNKSVVNTDPQGYPNRVRQQREKGIWVYERYPAVDSAQPPYTIDPDTGKVTWKYQEEGKPDDKPKLEVASWQEDVDGKQVTRYAFIDEAEHSTEESLEAAKAKIFEKFPGLQECKDSTYHYEINCLERRPGTDVPVTGGMYVPRYTQLNLDADTAKAMVQAADLGTNIQRLYQHELYFRTNGRKGERLSSVDLERLYQNMSVWLWNKIEYRYENDKDDELGFKTFTEFLNCYANNAYSEGTQCSADLKKSLVDNNMIYGDGSSKAGMMNPSYPLNYMEKPLTRLMLGRSWWDLNIKVDVEKYPGAVSAEGEKVTETISLYSNPTKWFAGNMQSTGLWAPAQQEVTIESTASVPVTVTVALADDLTGREKHEVALNRPPKVTKTYDLKANDKVTFKVPYGGLIYIKGNSPKNESAEFTFTGVVKAPFYKDGEWKNALNSPAPLGELESDSFVYTAPKNNLNASNYSNYTDGVAEFAKELDTFASSMNDFYGRDGESGNHRMFTYKALTGHKHRFANDVQISIGDAHSGYPVMNSSFSTNSTTLPTTPLNDWLIW

SEQ ID NO: 92 - protein, 1270 aa, Escherichia coli
DTPPVDSGTGSLPEVKPDPTPNPEPTPEPTPDPEPTPEPTPDPEPTPEPEPEPVPTKTGYLTLGGSLRVTGDITCNDESSDGFTFTPGDKVTCVAGNNTTIATFDTQSEAARSLRAVEKVSFSLEDAQELAGSDNKKSNALSLVTSMNSCPANTEQVCLEFSSVIESKRFDSLYKQIDLAPEEFKKLVNEEVENNAATDKAPSTHTSPVVPATTPGTKPDLNASFVSANAEQFYQYQPTEIILSEGRLVDSQGDGVVGVNYYTNSGRGVTGENGEFSFSWGETISFGIDTFELGSVRGNKSTIALTELGDEVRGANIDQLIHRYSKAGQNHTRVVPDEVRKVFAEYPNVINEIINLSLSNGATLGEGEQVVNLPNEFIEQFKTGQAKEIDTAICAKTDGCNEARWFSLTTRNVNDGQIQGVINKLWGVDTNYKSVSKFHVFHDSTNFYGSTGNARGQAVVNISNAAFPILMARNDKNYWLAFGEKRAWDKNELAYITEAPSIVRPENVTRETATFNLPFISLGQVGDGKLMVIGNPHYNSILRCPNGYSWNGGVNKDGQCTLNSDPDDMKNFMENVLRYLSNDRWLPDAKSSMTVGTNLDTVYFKKHGQVLGNSAPFAFHKDFTGITVKPMTSYGNLNPDEVPLLILNGFEYVTQWGSDPYSIPLRADTSKPKLTQQDVTDLIAYMNKGGSVLIMENVMSNLKEESASGFVRLLDAAGLSMALNKSVVNNDPQGYPDRVRQRRSTPIWVYERYPAVDGKPPYTIDDTTKEVIWKYQQENKPDDKPKLEVASWQEEVEGKQVTQFAFIDEADHKTPESLAAAKQRILDAFPGLEVCKDSDYHYEVNCLEYRPGTGVPVTGGMYVPQYTQLDLGADTAKAMLQAADLGTNIQRLYQHELYFRTNGLQGERLNSVDLERLYQNMSVWLWNETKYRYEEGKEDELGFKTFTEFLNCYTNNAYVGTQCSAELKKSLIDNKMIYGEESSKAGMMNPSYPLNYMEKPLTRLMLGRSWWDLNIKVDVEKYPGVVNTNGETVTQNINLYSAPTKWFAGNMQSTGLWAPAQQEVSIESKATVPVTVTVALADDLTGREKHEVSLNRPPRVTKTYDLKANDKVTFKVPYGGLIYIKGDSKEVQSADFTFTGVVKAPFYKDGKWQHDLNSPAPLGELESASFVYTTPKKNLNASNYTGGLEQFANDLDTFASSMNDFYGRDSEDGKHRMFTYKNLPGHKHRFANDVQISIGDAHSGYPVMNSSFSPNSTTLPTTPLNDWLIW

SEQ ID NO: 93 - protein, 1268 aa, Escherichia coli
DTPPVDSGTGSLPEVKPDPTPNPEPTPEPTPDPEPTPEPTPDPEPEPEPEPVPTKTGYLTLGGSQRVTGATCNGESSDGFTFTPGEDVTCVAGNTTIATFDTQSEAARSLRAVEKVSFSLEDAQELAASDDKKSNAVSLVTSSNSCPANTEQVCLTFSSVIESKRFDSLYKQIDLAPEEFKKLVNEEVENNAATDKAPSTHTSPVVPVTTPGTKPDLNASFVSANAEQFYQYQPTEIILSEGRLVDSMGNGVVGVNYYTSSGRGVTGENGKFNFSWGETISFGIDTFELGSVRGNKSTIALTELGDEVRGANIDQLIHRYSQAGKNDEREVPDVVRKVFAEYPNVINEIINLSLSNGEALSEGDQTFERTNEFLEQFESGQAKEIDTAICDSLGGCNSQRWFSLTARNVNEGQIQGVINKLWGVDKDYKSVTKFHVFHDSTNFYGSTGNARGQAVVNISNAAFPILMARNDKNYWLAFGEKRAWDKNELAYITEAPSLVEPENVTRDTATFNLPFISLGQVGEGKLMVIGNPHYNSILRCPNGYSWEGGVDKNGQCTRNSDSNDMKHFMQNVLRYLSDDKWTPDAKASMTVGTNLDTVYFKRHGQVTGNSAEFGFHPDFAGISVEHLSSYGDLDPQEMPLLILNGFEYVTQVGNDPYAIPLRADTSKPKLTQQDVTDLIAYLNKGGSVLIMENVMSNLKEESASGFVRLLDAAGLSMALNKSVVNNDPQGYPNRVRQQRATGIWVYERYPAVDGALPYTIDSKTGEVKWKYQVENKPDDKPKLEVASWLEDVDGKQETRYAFIDEADHKTEDSLKAAKAKIFEKFPGLKECKDPTYHYEVNCLEYRPGTGVPVTGGMYVPQYTQLSLNADTAKAMVQAADLGTNIQRLYQHELYFRTNGRKGERLSSVDLERLYQNMSVWLWNKIEYRYENDKDDELGFKTFTEFLNCYANDAYTGGTQCSDELKKSLVDNNMIYGEKSVNKAGMMNPSYPLNYMEKPLTRLMLGRSWWDLNIKVDVEKYPGAVSAEGEKVTETISLYSNPTKWFAGNMQSTGLWAPAQKEVTIESSASVPVTVTVALADDLTGREKHEVALNRPPKVTKTYDLKANDKVTFKVPYGGLIYIKGNSPKNESAEFTFTGVVKAPFYKDGEWKNALNSPAPLGELESDAFVYTTPKKNLEASNFTGGVAEFAKDLDTFASSMNDFYGRNDEDGKHRMFTYKNLTGHKHRFTNDVQISIGDAHSGYPVMNSSFSTNSTTLPTTPLNDWLIW

SEQ ID NO: 94 - protein, 1270 aa, Escherichia coli
DTPPVDSGTGSLPEVKPDPTPNPEPTPEPTPDPEPTPEPIPDPEPTPEPEPEPVPTKTGYLTLGGSQRVTGATCNGESSDGFTFTPGEDVTCVAGNTTIATFNTQSEAARSLRAVEKVSFSLEDAQELAASDNKKSNAVSLVTSSNSCPADTEQVCLTFSSVIESKRFDSLYKQIDLAPEEFKKLVNEEVENNAATDKAPSTHTSPVVPVTTPGTKPDLNASFVSANAEQFYQYQPTEIILSEGRLVDSQGYGVAGVNYYTNSGRGVTGENGEFSFSWGETISFGIDTFELGSVRGNKSTIALTELGDEVRGANIDQLIHRYSTTGQNNTRVVPDDVRKVFAEYPNVINEIINLSLSNGATLDEGEQVVNLPNEFIEQFKTGQAKEIDTAICAKTDGCNEARWFSLTTRNVNDGQIQGVINKLWGVDTSYKSVSKFHVFHDSTNFYGSTGNARGQAVVNISNAAFPILMARNDKNYWLAFGEKRAWDKNELAYITEAPSIVRPENVTRETATFNLPFISLGQVGKGKLMVIGNPHYNSILRCPNGYSWEGGVDKNGQCTRNSDSNDMKHFMQNVLRYLSNDKWTPDAKASMTVGTNLDTVYFKRHGQVTGNSAEFGFHPDFAGISVEHLSSYGDLDPQKMPLLILNGFEYVTQVGGDPYAVPLRADTSKPKLTQQDVTDLIAYMNKGGSVLIMENVMSNLKEESASGFVRLLDAAGLSMALNKSVVNNDPQGYPDRVRQRRATGIWVYERYPVVEGELPYTIDSKTGKVTWKYQIDNKPDKKPKLEVASWQEEVDGKQVTQFAFIDEADHKTTESLDAAKKKILEKFKGLEECKDSTYHYEINCLEYRPGTNVPVTGGMYVPRYTQLNLSADTAKAMVQAADLGTNIQRLYQHELYFRTNGRKGERLSSVDLERLYQNMSVWLWNEIEYSYDSSKEDELGFKTFTEFLNCYANDAYTGGTQCSDELKKSLVDNNMIYGEKSVNKAGMMNPSYPLNYMEKPLTRLMLGRSWWDLNIKVDVEKYPGAVSAEGEKVTETISLYSNPTKWFAGNMQSTGLWAPAQKEVTIESSASVPVTVTVALADDLTGREKHEVALNRPPKVTKTYDLKANDKVTFKVPYGGLIYIKGNSPKNESAEFTFTGVVKAPFYKDGEWKNALNSPAPLGELESDAFVYTTPKKNLEASNFTGGVAEFAKDLDTFASSMNDFYGRNDEDGKHRMFTYKNLTGHKHRFTNDVQISIGDAHSGYPVMNSSFSTNSTTLPTTPLNDWLIW

SEQ ID NO: 95 - protein, 1270 aa, Escherichia coli; identical to SEQ ID NO: 77

SEQ ID NO: 96 - protein, 11 aa, Escherichia coli
HEVGHNYGLGH

SEQ ID NO: 97 - protein, 11 aa, Escherichia coli
HEVGHNAAETP

SEQ ID NO: 98 - DNA, 31 bp, Escherichia coli
ggaattccatatgtgtgatggtggtggttca

SEQ ID NO: 99 - DNA, 27 bp, Escherichia coli
ccgctcgaggttgttcaccaccgattt

SEQ ID NO: 100 - DNA, 30 bp, Escherichia coli
ggaattccatatggatccgcaagggtatcc

SEQ ID NO: 101 - DNA, 27 bp, Escherichia coli
ccgctcgagctcggcagacatcttatg

SEQ ID NO: 102 - DNA, 33 bp, Escherichia coli
acgactggctgatttggcacgcagtcggtcata

SEQ ID NO: 103 - DNA, 30 bp, Escherichia coli
gtgccaaatcagccagtcgttcagcggcgt

SEQ ID NO: 104 - DNA, 41 bp, Escherichia coli
gaaggagatatacatatggatacgccgtctgtagattctgg

SEQ ID NO: 105 - DNA, 40 bp, Escherichia coli
gtggtggtgctcgagttaccaaatcagccagtcgttcagc

SEQ ID NO: 106 - DNA, 41 bp, Escherichia coli; identical to SEQ ID NO: 104

SEQ ID NO: 107 - DNA, 37 bp, Escherichia coli
gtggtggtgctcgagccaaatcagccagtcgttcagc

SEQ ID NO: 108 - DNA, 43 bp, Escherichia coli
catatgatatctccttcttaaagttaaacaaaattatttctag

SEQ ID NO: 109 - DNA, 18 bp, Escherichia coli
ctcgagcaccaccaccac

SEQ ID NO: 110 - protein, 26 aa, Escherichia coli
ICICICICICICICICICICICICIC

SEQ ID NO: 111 - protein, 11 aa, Escherichia coli
KLKLLLLLKLK

1-62. (canceled)

63. An immunogenic polypeptide comprising an E. coli AcfD (orf3526) polypeptide comprising a mutation relative to the E. coli AcfD (orf3526) protein which decreases the toxicity of the immunogenic polypeptide as compared to the E. coli AcfD (orf3526) protein and wherein the immunogenic polypeptide raises a substantially similar immune response in a subject as the E. coli AcfD (orf3526) protein.

64. The immunogenic polypeptide of claim 63, wherein the E. coli AcfD (orf3526) protein has an amino acid sequence selected from the group consisting of SEQ ID NOs:1-19.

65. The immunogenic polypeptide of claim 63, wherein the mutation is selected from a deletion of all or a portion of the zincin metalloprotease domain and a point mutation in zincin metalloprotease domain which reduces the protease activity.

66. The immunogenic polypeptide of claim 63, wherein the point mutation is a mutation of a zinc binding residue or a mutation of a catalytic residue.

67. The immunogenic polypeptide of claim 63, wherein the zinc binding residue is amino acid number 1305 based upon alignment with SEQ ID NO: 1.

68. The immunogenic polypeptide of claim 63, wherein the immunogenic polypeptide does not comprise at least the last 100 C-terminal amino acids of the E. coli AcfD (orf3526) protein, at least the last 200 C-terminal amino acids of the E. coli AcfD (orf3526) protein, at least the last 300 C-terminal amino acids of the E. coli AcfD (orf3526) protein, at least the last 400 C-terminal amino acids of the E. coli AcfD (orf3526) protein, at least the last 500 C-terminal amino acids of the E. coli AcfD (orf3526) protein, at least the last 600 C-terminal amino acids of the E. coli AcfD (orf3526) protein, at least the last 700 C-terminal amino acids of the E. coli AcfD (orf3526) protein, at least the last 750 C-terminal amino acids of the E. coli AcfD (orf3526) protein, or at least the last 758 C-terminal amino acids of the E. coli AcfD (orf3526) protein or does not comprise at least the first 100 N-terminal amino acids of the E. coli AcfD (orf3526) protein, at least the first 200 N-terminal amino acids of the E. coli AcfD (orf3526) protein, at least the first 300 N-terminal amino acids of the E. coli AcfD (orf3526) protein, at least the first 400 N-terminal amino acids of the E. coli AcfD (orf3526) protein, at least the first 500 N-terminal amino acids of the E. coli AcfD (orf3526) protein, at least the first 600 N-terminal amino acids of the E. coli AcfD (orf3526) protein, at least the first 700 N-terminal amino acids of the E. coli AcfD (orf3526) protein, at least the first 750 N-terminal amino acids of the E. coli AcfD (orf3526) protein, or at least the first 760 N-terminal amino acids of the E. coli AcfD (orf3526) protein.

69. The immunogenic polypeptide of claim 63 wherein the immunogenic polypeptide fragment comprises an amino acid sequence that comprises:
(a) the amino acid sequence selected from the group consisting of SEQ ID NOs 20 to 76;
(b) from 1 to 10 single amino acid alterations compared to SEQ ID NOs: 20 to 76;
(c) at least 85% sequence identity to any one of SEQ ID NOs: 20 to 76; or
(d) when aligned with any of SEQ ID NOs: 20 to 76 using a pairwise alignment algorithm, each moving window of x amino acids from N terminus to C terminus has at least x·y identical aligned amino acids, where x is 30 and y is 0.75,
wherein the immunogenic polypeptide raises a substantially similar immune response in a subject as the E. coli AcfD (orf3526) protein.

70. The immunogenic polypeptide of claim 63, wherein the immunogenic polypeptide further contains a deletion relative to the E. coli AcfD (orf3526) protein which increases solubility of the immunogenic polypeptide as compared to the E. coli AcfD (orf3526) protein.

71. The immunogenic polypeptide of claim 70, wherein the deletion is removal of substantially all of the N-terminal amino acids up to the gly-ser region, removal of all or a part of the N-terminal proline-rich repeat, or both.

72. The immunogenic polypeptide of claim 70, wherein the deletion is removal of at least the first 20 N-terminal amino acids as compared to the E. coli AcfD (orf3526) protein, at least the first 20 N-terminal amino acids as compared to the E. coli AcfD (orf3526) protein, at least the first 30 N-terminal amino acids as compared to the E. coli AcfD (orf3526) protein, at least the first 38 N-terminal amino acids as compared to the E. coli AcfD (orf3526) protein, at least the first 40 N-terminal amino acids as compared to the E. coli AcfD (orf3526) protein, at least the first 50 N-terminal amino acids as compared to the E. coli AcfD (orf3526) protein, at least the first 60 N-terminal amino acids as compared to the E. coli AcfD (orf3526) protein, at least the first 70 N-terminal amino acids as compared to the E. coli AcfD (orf3526) protein, at least the first 80 N-terminal amino acids as compared to the E. coli AcfD (orf3526) protein, at least the first 90 N-terminal amino acids as compared to the E. coli AcfD (orf3526) protein, or at least the first 94 N-terminal amino acids as compared to the E. coli AcfD (orf3526) protein.

73. The immunogenic polypeptide of claim 63 wherein the immunogenic polypeptide fragment is isolated, purified, or recombinant.

74. The immunogenic polypeptide of claim 63 further comprising an adjuvant.

75. A polynucleotide encoding the immunogenic polypeptide of claim 63.

76. An E. coli cell, containing a plasmid that encodes the immunogenic polypeptide of claim 63.

77. A vaccine component comprising the immunogenic polypeptide of claim 73.

78. A vaccine comprising the vaccine component of claim 77.

79. The vaccine of claim 78 further comprising an adjuvant.

80. The vaccine of claim 78 further comprising an additional vaccine component selected from: a Neisseria meningitidis antigen, a Streptococcus pneumoniae antigen, a Streptococcus pyogenes antigen, a Moraxella catarrhalis antigen, a Bordetella pertussis antigen, a Staphylococcus aureus antigen, a Staphylococcus epidermis antigen, a Clostridium tetani antigen, a Cornynebacterium diphtheriae antigen, a Haemophilus influenzae type B (Hib) antigen, a Pseudomonas aeruginosa antigen, a Legionella pneumophila antigen, a Streptococcus agalactiae antigen, a Neiserria gonorrhoeae antigen, a Chlamydia trachomatis antigen, a Treponema pallidum antigen, a Haemophilus ducreyi antigen, a Enterococcus faecalis antigen, a Enterococcus faecium antigen, a Helicobacter pylori antigen, a Staphylococcus saprophyticus antigen, a Yersinia enterocolitica antigen, an additional E. coli antigen, a Bacillus anthracis antigen, a Yersinia pestis antigen, a Mycobacterium tuberculosis antigen, a Rickettsia antigen, a Listeria monocytogenes antigen, a Chlamydia pneumoniae antigen, a Vibrio cholerae antigen, a Salmonella typhi antigen, a Borrelia burgdorferi antigen, a Porphyromonas gingivalis antigen, and a Klebsiella antigen.

81. An immunogenic polypeptide fragment wherein the immunogenic polypeptide fragment comprises an amino acid sequence that comprises:
(a) the amino acid sequence selected from the group consisting of SEQ ID NOs 77 to 95;
(b) from 1 to 10 single amino acid alterations compared to SEQ ID NOs: 77 to 95;
(c) at least 85% sequence identity to any one of SEQ ID NOs: 77 to 95; or
(d) when aligned with any of SEQ ID NOs: 77 to 95 using a pairwise alignment algorithm, each moving window of x amino acids from N terminus to C terminus has at least x·y identical aligned amino acids, where x is 30 and y is 0.75,
wherein the immunogenic polypeptide has lower toxicity as compared to the E. coli AcfD (orf3526) protein and wherein the immunogenic polypeptide raises a substantially similar immune response in a subject as the E. coli AcfD (orf3526) protein.

82. The immunogenic polypeptide fragment of claim 81, wherein the immunogenic polypeptide fragment does not comprise at least the first 10 N-terminal amino acids of the E. coli AcfD (orf3526) protein, at least the first 20 N-terminal amino acids of the E. coli AcfD (orf3526) protein, at least the first 25 N-terminal amino acids of the E. coli AcfD (orf3526) protein, at least the first 30 N-terminal amino acids of the E. coli AcfD (orf3526) protein, or at least the first 33 N-terminal amino acids of the E. coli AcfD (orf3526) protein.

83. The immunogenic polypeptide fragment of claim 81, wherein the immunogenic polypeptide fragment does not comprise at least the last 125 C-terminal amino acids of the E. coli AcfD (orf3526) protein, at least the last 150 C-terminal amino acids of the E. coli AcfD (orf3526) protein, at least the last 175 C-terminal amino acids of the E. coli AcfD (orf3526) protein, at least the last 200 C-terminal amino acids of the E. coli AcfD (orf3526) protein, at least the last 210 C-terminal amino acids of the E. coli AcfD (orf3526) protein, or at least the last 217 C-terminal amino acids of the E. coli AcfD (orf3526) protein.

84. An immunogenic polypeptide fragment wherein the immunogenic polypeptide fragment comprises an amino acid sequence that comprises:
(a) the amino acid sequence selected from the group consisting of SEQ ID NOs 77 to 95;
(b) from 1 to 10 single amino acid alterations compared to SEQ ID NOs: 77 to 95;
(c) at least 85% sequence identity to any one of SEQ ID NOs: 77 to 95; or
(d) when aligned with any of SEQ ID NOs: 77 to 95 using a pairwise alignment algorithm, each moving window of x amino acids from N terminus to C terminus has at least x·y identical aligned amino acids, where x is 30 and y is 0.75,
wherein the immunogenic polypeptide raises a substantially similar immune response in a subject as the E. coli AcfD (orf3526) protein.

85. The immunogenic polypeptide fragment of claim 84, wherein the immunogenic polypeptide fragment does not comprise at least the first 10 N-terminal amino acids of the E. coli AcfD (orf3526) protein, at least the first 20 N-terminal amino acids of the E. coli AcfD (orf3526) protein, at least the first 25 N-terminal amino acids of the E. coli AcfD (orf3526) protein, at least the first 30 N-terminal amino acids of the E. coli AcfD (orf3526) protein, or at least the first 33 N-terminal amino acids of the E. coli AcfD (orf3526) protein.

86. The immunogenic polypeptide fragment of claim 84, wherein the immunogenic polypeptide fragment does not comprise at least the last 125 C-terminal amino acids of the E. coli AcfD (orf3526) protein, at least the last 150 C-terminal amino acids of the E. coli AcfD (orf3526) protein, at least the last 175 C-terminal amino acids of the E. coli AcfD (orf3526) protein, at least the last 200 C-terminal amino acids of the E. coli AcfD (orf3526) protein, at least the last 210 C-terminal amino acids of the E. coli AcfD (orf3526) protein, or at least the last 217 C-terminal amino acids of the E. coli AcfD (orf3526) protein.

87. An immunogenic composition comprising an immunogenic polypeptide fragment with an amino acid sequence that comprises at least 90% sequence identity to any one of SEQ ID NOs: 77 to 95, wherein the immunogenic polypeptide fragment does not comprise the C-terminal 180 amino acids of the E. coli AcfD (orf3526) protein or does not comprise the C-terminal 200 amino acids of the E. coli AcfD (orf3526) protein.
